United States Patent Application Publication US 2011/0183924 A1 - sequence listing, part 259

SEQ ID NO: 735309 - DNA, 188366 bp, Homo sapiens
ctccaaggctgagggatgaggagacctgctgaggacccagggccttatctttccatcccactccataggtcccagtattgactgatgctgtcttcacctcctagcctcacttttaaccttctggcacccgcccaccactgtccagttcactattgaagccctgccgtccagtgctgcagagggaaaggatgttcttctactggcctgcaatatttcagaaactattcaagcctattattggcacaaggggaaaacggcagaagggagccctctcattgctggttatataacagacattcaagcaaatatcccaggggccgcatacagtggtcgagagacagtataccccaatggatccctgctgttccaaaacatcaccctggaggacgcaggatcctacaccctacgaaccataaatgccagttacgactctgaccaagcaactggccagctccacgtacaccgtgagtgattcccccatacctctgggtgctggcggtcagttctgcttcacacacatgagattgtcaggcctgggctgtgcctgcatccccctctgcattttgtcccgtgttgagatttgggcatttagtgcaggacacacacatggtaggtaaacttcaacagatcagaattcctttcctgcatccaggccctgcagacactgatggcgggggcgggggggcctcagcagggggaggtcagtctcagccaagcaccccatgccctccccatgaacctgaccctgagaaagaccctggagaactgggtcagggcctggcctgagggcgtcctgggaacctcacaaaagcccagcctcaggactcctgactccgtgtgaccccgggaagcctgtgtcagggctggggtgtggtctcctgggcagggcttactgggagcaaggatttaccagatgtctgcgggctgtggttcctgaagcttctcatcagtgagggctcagctcccagagtctcatctagacaaggacagagcctaccactttccctgggactcagcctggagagggcagggggacaggattactagggcattggccccctgaatgaggagcttaagagatgcccttgggcagtcagtggcccaggggtaggaacagaggggagaaaatgttcctggcagcttcttgtccaccggggatcatgcccaggggtgctctcccatggaggcaaataacagatgctgttgatgtgaacacctcctctgtgccaagcttcatgtcagatcctgtgaataatttaaagttcattcacagacaaagtggcaagcctcagaccattttccatttacatattgtatggaggggaaactgaggcacagagagatacagacaccggccacggtgggcagatcgcagctggcagagtcacatgagggctgtctgcagctgctgccacgtcctctccttcatccctggtgccttactaggtgtctgtggaccttagaacagccactggttcggatgttttcttcttaggtgtctacagctcggagggggagattctggtctggagagttatgagtaaatacagaattaatcagttttttcttaactaaatcacctgcctcaacaatcagtcagtgctggggaagttcaggcctcctcgctcaggtccacaccccgcatctctggacatgaaatggcttcgtgtgttttctgatgtgtgggtatcattccaacaggaggataaaggggaggactttgctttctctccccattcacaccctgcaccagccagggcccagtgtgagacacatactccgtagttctctcatgaaggagggagggaatgaatgaaggaatgatctataacctcttcagagacagagacctggatacaagatcctaggaggttctgggcccaacgtgagacacacactctgtagttctcttatgaaggagggagggattgaatgtaggaatgatctataacctcttcagagacagagatgtggatacaagatcctaggaggttctggccacacctgttttctgtccctctagagcctaagacccatgtctcattcatctggcccgtttctcctaaatctgcccctgggagctgagtctcatctgaccctggggctgcagggctgtgggaaggttttcaggggagggatcaggcttgcgggtagtcccacacgtttgccttacaccctggagctctacctggttctcactatgaatatcccataataatcccccctatcctttctggggagtagaaaaaaagtaaatatttaaaaatatgccagagcatctgttcttcttagcaagttcagatagttattagttagcaggaataaatcgttattttaccagagcctcacctgctgggggtttatgggagcctaactgactgaggggggtgggaaatatccaactccagccccctctagccatcatgtcccacctaaaggagagaaaaaactgagaggcacttgtgacattcacagcccagggcacagactctatccaggaccacagaacccctccctccccccactcaccaccgcatcactgaacgcctgctcacccaagttcctgttgcccagtacatcatgtcctggctttcaacaaaaactacaagacagactagaggcaaaaaaaaaaaaaaaaaaaatgcagttcgaaagacagaacaagcatcagaaccagatgcagatgtggcagggatgtggcagggatgttgaaattatcagaccaggaatttaaaacaactctggggccaggagcggtggctcatgcctgtaatcccagcatttgggaggccgaggcaggcagatcacctgaggtcaggagttcgataccagcctggccaacatggcaaaaccccgtctctactaaaaatacaaaaaattaggcaggcatggtggtgggtgcctgtaatcctagatactcggaaggctgaggcaggagaattgcttgaacctgtgaagcggaggttgcggtgagcctagattgtgccactgcactccagcctgggcaacagagcgagattccatctctaaaacaaacaaacaaaaaacaatactggctaatatgctaaaggctgcaatggaaagcatagacaatgtgcagaacagacggatgctgtgagcagagagatggacaggctaagaaagaataacaacagctactatatctatctatctatctatctatctatctatctatctatctatctatctatatatatgtatatatatgctagagatcaaactcactgtaacacctggatctcagagtggttgtgaggatgtttattaggagattaaagagattaaagcagagttatacacagggcgagagctcaactgatgctatcaactagtattcttatttttttgatgttgttattggcaataaaatcaggaacaatgcagtaaaaatttggttttatcatgtacgagttctgtgaccttccttgacttactgaggtactgtaagtctcagattctaactctgcagatggcggtgatgcccctctccctcaaggtgatgtgaggatgagatgagctgtaggtaggttggtgcccactgtgcctggcacatggaaggcccctgaaaatagtcaatgaacatcatccccgctcatcagcatggagttgacagtgagggctcgctctctgtgacaatcatggaatggaaaagaagaaacaagaggaagactgggcgcagtggctcatgcctgtaatcccagcactttgggaggccgaggcgggcagatcatctgaggtcaggagttcaagaccagcctggacaacatggcgaaatttcatctctactaaaaatataaaaattagcctggcatggtggcacaaacctgtaatcccagctacttgggaggctgaggcaagagaatcgcttgaacttgggagatggaggttgcagtgagccgagattgcgtcagtgcactccagtctgggtgacagagcaagactccatccaaaaaaaaaagaaaaagaaaaaagcaacagagggaagaggtgtgacatgagaggaagaagggatttaaaggtacaggagcagggcgaggtgcaagcacctgtgggagaatgtaggagttggtacatcccagtgtgtcaagtctgagacacagaaaatggtgcaaccgtggagagcaagggagtcagctatgaggacagcccaacagaccacactcaggctctggagcatttccttcctccctgactatgcccctgccctgcaatgccccttatggtttcccttggaacaaacttgggccttgtcccctttgccttcccctttctgcagaaaacaacgtcccaggccttcctgtgggggccgtcgctggcatcgtgactggggtcctggttggggtggctctggtggccgccctggtgtgttttctgcttctctccaggactggaaggtaccgcagcttttccccagcctcctcccacccctaggctgaccccagtcagggaggagggagaccccgccctgtattcagggccaggctttccgcatcctcccaaggaatccttccctctcattccatggctcctcccttgccagctgctgatcctaggctgcctcttcctttatgaatgtggcacagttaaggttgcacccctgagtgctgtcctagttccctaacacagcaaagccacagctgcctggagggaggaagggagggagggagggagggagataagacgggagtgctcagaacctggtaccttctgctgttcattgaatttacccacccagtgaggagggatttgcaggcttgagatccatggtgggggtcctgggcatggtcacgcagtggggagtggcaaagcctggacaggctgggtagggtcagcaccccatcgtgattgatgtccctgaggtgtgagatgggagaacctggacctcaggacctgctgtcctttatgtctcttgccaaggggtggagagagagaggacaaggccattgccccatttcagcatctccaggcctgaaaggagggtctggccatggcagggatactgagttctgggagaatatgatacatgctccttgcctccccatgcccccagctcccccagtgtcctgcacacacagccggccctgctttccctctggggccttgacccttcctctcaggcaaacgcaggtggtctgattccctccctgagtcctcagtccctttcctgggtccctgggtcaatgttctcctcacccggcatctgcctgggggggtccttcctctctggccaggacagacgtgactgcttaaggcctatcctcagctccccgtcctcggccgctcctaccacgaaactgatggagacaggaggccttcactccagtccttgaaaatggagtcccttccttgtcctttattctgcccctaaacctgtgatttctccctgcaccctcatgaataatcctgacctttcctagggccagcatccagcgtgacctcagggagcagccgcccccagcctccacccctggtgagtgtcccttcagcccaggtgtgggagcccctaggcctgccctacggtgtccactcctgccagtcaccccctgggggcctctgaccctttctttggggctgcaaggaggatgtcaggaaacatgacacaggggaccccgactgtcttgttcagactgatctgtgggctctgggtcgtgggtcacctcctcgacctcagctgctcaggtctcccctgggaagaggctccctctccctgattctctgggagctgaggacccctacactctcctgcaggaggggcccaggctctcctcccaccctgctgctcactcctgtctctgtccccaggccatggtccctctcacagatccaccttctcggtaagcctgttccctccccagcccttttctactggggtcccaacagtgcaggctcagggcagggggaccatcaaccccacagcacagcactgacccacctttccccagaacagtcaggtcaaagtgagtgcctccagccaggatccgggcctctctacagggccaggaccacccacgccatgtgctgacccctccccgggaccctctacacctgaggagaaccctggagtccagcaggtgcagaatggacactgggaccatcagtcagaggcccacattaacaagggtgcggggtgggcccagccaggacaggggtcagggtgttgtgtccacactgggaggctgagctcaggggcagagctggtcaatcctgaggggaaatgagtggaagtggaggcagggaagtaagtcctggccgatcagagacaggaaccttccaggctgggcttccgtgaccctccctccctgtcccctgacatctcctctctcccctgcccaggcccctctacccagccccagaacagccactcccatctatgaggtgagtgtgggccatggatgttctggtcccgcaggctccaggggacccaggatctgcccccaccagcacctggctgagctcagattcaggaaaatgcagtgaaaatgagaacaggtggtggtgagcagaggagggaggggcctgggaacagggaccccctgagcacagccaggttcagccccagagaagccctgggtgggcccagagcctgggagatgccagacactgttctgagaaggctacaggggttgaggcctcttctctgtttttacaggaattgctatactctgatgcaaacatttactgccagatcgaccacaaagcagatgtggtctcttaggttcctctgggagctgctcttgtgggttgatggagcgtccccaaagctcccagccctggggacggggaaggacatggagcctgagccagagaaccagctctgagtcctgaggagacacaggcctggggacagggagggatgggagtccctgctgaatatctggagaccctgacaggttgccctgggctctgggtgggccgggacaaaggcctctcatcaccacaggaagcgggggcttgcaaggaaagtgaatgggcctgtggcccacccggggtcaccaggaaaggatctgaataaagaggacccttcctctcattggctctttttctgctcacgggaacttagcagaaactcacctgaaactccgtgtccattctctcccgggtcacacagggaaaatatctccaccttgtctcaaccacagtctctcttccctgggaggcagaaataggggttgggagtcaggctggggtgggccctacacaggaaagggcaagattcacatgagccctgcccagccagccgagcgctcagctgtcctcacactaccccagggaccaaggccatgcacagccccagcctgggtccctctgtgaatgcatgtggggtctcaggagcacagaagatggggccatctgatgtccacaaaaggtgagcaatgcgggagcaaccatgggtggtataggttgcggctgtggcccctacgcagcctccagtgtcctgacccctgctgccctcttcacccaggccctggaggcccagtctatcactgtcctccacaaatgaacttacctgtccccaaatccaggatcctgtgtgcttatacctggccactaggttctcctctgtcccagtggctactgctcaggacatctttatccctggtggggcacagagaggggctgtcagagcaaccaagattaatacagacgcataattcagtccttgagcactacccaggactctggcccctcattgctcatcagttcccactttaccccctggcatggatctcactgagcaagccaactctttacacaggagcatccaggtcagaggtgcaggactcccccatctaaagctcatgcaggctcccatggcgatgggacaacctgtctgctcctctccctggcccacagccctatctcgcctgcagctcctccacacacctgggacagcagttctcagcccttccctgagggcccctggaagggtgatgatctcatataggttcacttgaaccaggtgccaccttcccacaagtgagctggtgcctgcactaaagcacagagccacagttcccaagagtgttctgccactgccacaggtcccaagagtgttctgccactgccacaggttgttcgtcctgagatgagaggtaagaaaacaacccgcaatgggttgttttatatcgggatttgcatcaggatttagctctaaatgacccctgatcccacctgcacacagcgtcagatgagacaaggtgaggcctctttagttttctgttgaggctgtgacaaattaccacaagcttagtgacatagaaacctgaaccaaagtgcccacatggctgtgttctttctagaggctccagggaagagtgcatttcctctccttttccacctcctagaggcctcctgcaaccttggctgtgtcctctttctccatcttcaaagccagcagcacagcatcttgaaactattctgtgccctgcttccatccccacatctccacctcctcccacctccctctctcacttaaaaggaaggagccttgtggttattttggacgcacctgggataaaccacaacaacctccccatctcatgatccttcctttaatctgtaaagtgtcctttaccacgtgacatgtccacagatctggggatgaggatgtacacatctttgagaggcccttgttctgtccatcactcctctcaaggccatcttctcatcatcgttcactacaaactacacatgggcacctggatgggttcatcatgactgtggcgtcagttcctgcattaacatccccagcaccctccagatcctgagagagggagacggagggctctccatgcccctagtacctctccaccttcttcttggtgacatgcttagttgctaagaataacagaaagcggaggtgactgaaagatcacaactcaccggcccttcaatagttcgtggacatcagcaccacggacagtgactcagtgaggctaatttccaggtggcagcagggagcatgcagataggagggaactgcaggaaaagctgcccattctattctatatgagaaagagtgtaagaaagaggaagctattacagggataatgctattcttctctaatccataaattgcgaaacctttgcatgtctggatatcatggtttttagcacatctgctgccactccctgcagggctgattgctgcatccaggatgtggtctcttggggggctcacagcctgctttggcctcatggtgagtctccctgcccctgacactcaggccactgtctctgcctacaacatggtgggaaccttccatgattaacgtctgattctctgtgcctgacctttgaagcacatccatcactcagcctggagcatccgctgagctcagcatcctgctcctccatccccagctgagcccttgaggagatgcttgagaggatctcctgggctcctctgtgagctcctccaggctgagccttgtgcttggtgtcagaggcctttgccatctgcttgttctttccataggcaaataatcctcctcagggacaagtggggcctgaagatctgtctgaatatctatctatctatctatctatctatctatctatctatctatctatcatctatctatatgtatgtatatatgagaatgctttattaggcaaaactgcatactatgaacatgctttaaaatgcaacaggatgagatgtgaagacataaagaacaagtgtgtagtgacacatggctatcagaacacactgaagaatccacaccgcggccgagagcagtggctcacgcctgtagtcccagcacttttggaggctgaggcaggcagatcacttgaggacaggtgttcgagaccagcctgaccaacatggtgaaaccccatctctactaaaaatacaaaaaatttagccgggcctggtggctcatgcctgtagtcctggctgttcgggaggctgaggcaggagaattgcctgaacctgggagacacaagttgcagtgagctgagatcgcaccactgcactccagcctgggagatagagtgaggctccatctaaaaacaaaacaaaacaaaaagaatccacactgcttccccgcttcactttacccagaaaaggaatgttctaggccacttcctcttcagcacacatccccagggaactaaaataggttcacagtcacccccatcttcctcattcccatcacctcttacccacagaggcatctctggtcctacagatccagccctgccttcaagaggcacaggtccaacccatccagtgtccctgctagtcacacacagcactcagggtacaatggagggcttctgtgctttggatgggaacaaaccccacctcacattcccacacctgagaagccaccagggtcctctctgtcctgtcctcacactcaatgtctgtcctgggtcacccttgtcatctctcctggaaataggcatggctcctgacaggtaggattgaggctttgtcttttcaggagtccctcccactctgagcacatgaaactgctcagctccatgcaaccctctctcaccaggggccttgttctctgggtccctgaatacctgggtccatgccatgtacattttaagaaaaatgacagtgactctcaccctgacatcctcacccaaggcacgtgtctgacaagaatcaccaggtgagatacctgtggctccacacacctgaggcttcactgcgcaggggtgtcctcatccctctcctcccacccctagggacagtaagcaccacaggctgccttggaccaccagctccccctcccagacacagcctcagatctatactgacatgctacatggagaggctctgatgaacagcaggtattaggaaatcccaccgaaccaggtgccacttgcggccccactcctcctcatatctgtgactgggacagacacacataacacacctctgttcaccgcccagcccccaaggtcaatcacagtctgcttctcccctagatccactgctccccatgtcttccgtcctcagctgcatcctgggtggcctccttgctgttcttgtaccccagaggcaggttccaacctttgtgatgttgcctgcaatgcccaaactttcccttccccttccccttcccttttcccctcccccttcccctccccttcccctccccacccctatcccttcgtcttcccttgtcttcccttcccttccctataaagccaaacatacccatccacctaccttgtggtcaaagtcatcagcctcctgctccactcagtgttctctgaccctgcatatggaggtggtggcccctcctagaacacccaccactcactgtcagccttgcgtggtaatcacagattttgcaggggttacctgtgttcaggtgtgtcacctgtggaaccagaactcttggaaggactggcagagggagctgcttaggatatctcagggctcctggcatctggtctaccacagggctattaacaacagcacttagggacaaggtggaggatggacggttaagagggtaaatatggatgatgtgtgggcaaagaataggacacaggaacacatgcagtactcaaataattatgccaagaaaggtgaggacatggagatggacattcccatatacttctgatgggactgcagtttagtccctacagcaacattgacctcatcatgtttaacgcgcacacgctctgaccactatcctacttctgaaggcctccctgtgctgtgagctctgagaaggccaagcttgcctgttctgtctctgctaaagccagagaccagccaatagcccagcacagggtacttcataaatacatgttgaaggaatgagctccaggaacagtactccacatggtagagatgtgtgtatgaggatgttcactgcagaaggtcatgtcaatgtgacaagtgacgagcagcctcaaatccagcaacaggggtgtgggtaaaagatcatagtgtagccatgcaatggaaccaatgaaaaaaccacaattagagcaaatccacatgtattaataaaggaggtgccctccatacatgctgcacctaacagaatgttgccaaataagaatgaaaaatgatgatatttgggctgtaaaaactagaagtcagctaaataagaatgcatcgaaagtatttgtgaatgcttacaattttataatgccttggcatccgttttggatggaagttggactttctcataccagaagcagggctcagtcacctttgaaatagtttccagttctccacctccttccagttcctcagtgtgattgatcagatatctgatttatacaactgcctcctggtgacctcctccctatgggacttccggatacagcccgtatgactgccccactgaccccacaccctgcctgctgcagtgaccacctctaattacctggatctcatgtctgcttgcattaaatccaccaattaaaactccctgaggacaatctgtttgaataatattctgtaccctaataaaggccttgacccatgggttccccctctgtcctccccatactgcccctgacctctgtgtgtgtgtgtgggtgtgggtgtatgtgtgtgtgtgtgtgtgtgtcctccagacagggcctgtatcccccaggacctgtaagtaataaatctttattttcatcttatgtctctcgcaatcattggcaagagctctgcatcttaaagatcgcaaatttaagaaattggtgtagtcggcacaatagagtacctcttctgtttagcacaagatatctcggagctgctgaggcttttaacatcctcgccggtgtggctgcctcactggtgaggccgttctgttcagtgcaattcagttgctccactgtgtgctgctgtgttgctgctgtagagtgctgccatgttgttctccccaaattgttaccgagtaggaacctgtaatgtgctcccaaggtggtctaccccatgagaagggggattctccatctagggcaagggctaggtgtgtttctggaatcctaatagggaaggcatccacagagggtgaactccactcctccttagagtgaggagtgacatttcccatttattttccccatggaggtgccatgtattgactttttctttcactgtcccaaggttgagccaaggtgagctatggagaccagggcaagataccatttctgttagcaaagcaaatgggtgacaacgtgtggagaagctgtggttctcctgatggatatagcagagtgccatttagtaaaatcttgtcaggaggctgcccctggttagaccggcagtgtctgtagtcactaaggtggatgcgaattttaggccctgggccatggataatccctgcagacacagccgtggcttcatgtgatggggcaatcccgggctagtggctcccttgtttctgcatttcttgctgtggttgcacaatcaacacctcaggggttgattgggtcaccttggaaagagaaacagctgcctaggaggctggtgcacatggaggccaccctcaattttattctgctaacaagttgtaagattaaaacaacagggggctttgggtaccatcaggaacttgtcaagtaaacatccaaagacagaaagaagaaaaagaaaaagacattaaccgtctagaaatacaagccattttaaagattttgcttaaaagatgcgcttgggctgggagcggtggctcacacctgtaatcccagcactttgggaggccaaggtgggtggatcgactgaggtcaggagttcaagaccagcctgaccaacatggtgaaacctcgcctctactaaaaatacaaaaaattagcagggcatggtggcaggtgcctgtaatcccagctacttgggtggagaatcgcttgaacccgggaggcagagacggcagtgagccaagatcgcaccactgtactccagtctgggcgacagagtgagacttcatctcaaaaaaaaaaaaaaaaaaaaaaaaaagacgggcttgtttcgtcgttgtggagtcatcccagagagaggctactccctagagtcactgaccacctttcctcctccatcttttcctcttatcattctagagacagaaaacaagaatctcagctttaggtggctaacctcaccccccaagaaaagaaactaccactttgattgactacaaatccaagaaaaataaaagagaaactttaaaaagtactgagcaaaccacaggtctagcaaacataatgctagccctaggttacttattcatttacaacaaacccctagatataggaggaaaaaataaaaggtaattaaatatatacacatacaatattttaatataaatatataataaatagttaaattatgtatgtataatatgtaactaaatcaaagtaaaatttcatactttgattctattggaaattcaaaattcatttattaacttatatattaaggaatttatgtaaaaaaagatttttaaaagggcaccaatttgcttttgtgtctctacaacataggatctaatttaactttacatttgctaaatacactaattgacaaatattcatggatttaatcaatactggggctcaaattgtagccacacgtgggaatcccataaatttaaacactctgtccctattatcttgagaagaaaactaaatataaaattgaaaaaaacaggtatgtctcaatttacctgtaactttgcctaaatttcccggagtcatatacccattgctgtaaaacattctctattggacataggtgctctgagacaataaataaaatagaagtgtttttggtacttagacattggcttgacaaaatgggatcccatgaaacctcagttaagatagtgaatacggcccaatgtgagttgaaatggggcctttaaggattaaaacttattacatgaaacctagtaagtaatggggtgattatccatactgcttctccatttcatagcccaattttgacagttgtcaaatctggaaaaaacaaacaaacaaacaaaaaaacccctgggaatctgttgcctcacagagacacaaagtagacatcaaaattgtatatctcagttccagttccaaaatggtggcatagaagcaagctggctttactccttcacacagaaaaccaaaaacaaatatacagcaccaaaattattaccagatatattccagaactcaaatatgaaaatgaaacagttttcagagccacagagaagtgaaaaaaactcccgacagatgacaaaagaatcagatttccccatctgtaatgtccctccctgccccattctgcctggtaccaggtgtgtggaaaattttaccccaactcatggtttctacactgggaaatgtaagatcaatgcgggcaaccagtttctgcacaatcctgggttccctgtccctgccttaacccacaagaagcattgtgagtgcccgaagggagaaatttccctgaggacagtcaaagagtggggaggcaggactaccatctccttccctggaaactctgctgtgtaactcagccaagggagacatgaaatcagactggtgtttcagcagctccatgttgtagtaggtttgtttcacaggtatcctgggcatggacatctagccagctttcccacactgccaggatatcccctttgggacctccctcagttaggaagggcacactctgatcatttactagggccaaggtaaaccctaaaggtaacttagagatgaaaaggaggtagtgacctagcagtaaagaactctaagaaaatctatccaataaaaatcaaaacaagccagacaaagactaaaataaataatgaatccttcaatgtaaagacctggacttacatccacaagaaacagtaagcaggtaaccatgatctccccacatggacaaagtgaggaacaagtgactgatcctgatgagatggtgatgtgtgagctctctaatcaagaattcaaaactgcagttttaaggaaactcaatgatcttcaagaaaacatggaaaagcagttcagaaatttatcagagaaatttaacgaagggattgaaataatttaaagaaaacaaacaggaatcttggaattgagaaatatatttgctgaacaggaaaatttattagagtctctcaacagcagaatggatcagaggaaagaatcaacccaaataagactcccccaaggcataaaataatcgaattctcaaaagtcaagggcaaagagaagattttaaaacagaaagagaaaagaagcaaatggcataaagaagctccaattctgtggcaacagattttcagtggaaatcatacagaccaggagggagtgacatgacattctcaaaatgctgaaaaaatattgacatttgagaatactttatccagtgaagttatccttcaatataaaggagagagaaagtttcctagacaaacaaaagctgagataattcacaccatcagactagtcttcctgtaaatactaaagggtaaatactaaatacttcaatgtgaaagtaaaaaaaaaaacactaacatgcaaaacaaccacaacaacaataacaacatttgaaggtataaaatccactggtgaaattaagtacgtagacaaacccagaatactcaaatagtaattgtggaaagtaatccaatcataactctagcatgagtctcaaaatataaatctatcaaaaacaataatacattttaggaggccaaggttggcagattccttgaggtcaagagttcaagaccagcctggtcaaaatggtgaaaccccatctctaccaaaaaatacaaaaatttgcagggtatggtagcacatgcctgtcgtttcagctatttgggaggctgaggcaggagaattgcttgaacccaggaggtggaggttgcagtgagctgagattgcactactgcactccagcctgggtgacagagggagactctgtcttaaaaaaaaatagctacctgtttggagaaaggtaatataaaatatgtaaatagagacaaagtcaaaatttgcaaaggatgaaattaaagagtagagtttttttggggggttttctgtttctattattttatttgtgatctaagataagttgttaccttttcttctcttgaagatactttgttatatctatgtttttggaagtcttatggtaactgcaacgcaaaaaatctatgatagatccactgaaaataaaaaacaatgacttaaaacatactaccagagacaatcaaccacaaggaagacagtaaaaaatgaagaaaggaagaggggagttacaaaacaaccagaaaacaggcaacaaagtggcagtagtaagttcttacttaaaaatattgaacactgaatataaatggactctattctccaattaaaaggcatagagtggctgaatgctgcctatatgctgcctacaagaaaccacttcatgtaaaaagatacaaatagactgaaagtgaagggggtggaaaaagatatttcatgcaagtggaaaccaaaagagagcaggagtagctatactgatatgagataaactacaaatcaaagactataaaaagagacaaagaaagtcactatgtaatgataaagcgctcagttcagcaagaggagatgccaattataaatatctatgcatccaacacttgagctcccaagtctcccaagtatttaaagcaaacaatagtggatctaaaaggagagatagactgaatacaatattaattaggggactttaacaccctgctctcagcaatggccagatctttcagacagaaaatcaacaaggaaacttcaaagttaaactacacactagatcaaataggcctaactggcatttacgggacatttcactaactatctaactgttacagaattcacattattttcatcagcacatagaacattcttcagaacagaccacatcttaagtcccaaaaccagtcagaataaattcaaaaaagtttatatcacatcaagcatttgttctgaccacaatggaataaaactacaataaatgaataactttctggacacatacaacctaccaagatggaagcatgaaaaggcagaaaaacccaacaaaccaacatgaaactgtaacaaaaggaaaacccaggaccgaatgacttcactgctgaattctaccaaacatttaataagaactaaaaccaattctactcaaaatgctttaaaaaattgaagaggatggaacactttcaaactcattctacaaggtcagcattatcctgataccaaaaccagacaaggacaggacaaaaacaaacaaacaaacaaacaaacaaacaaacaaaaaaacactacaggattgcttgaggccaggagtttgagatcagcctgggcaacatagtcagaaccaatctcttaaaaaaaaaaaaaaagaaaaaaattagccaggcatggtggcatgtgcctttagtcctagctactcgggaggctgaggtgagaggaccaattgagcccaggaggttgaggccgcagtgagccatgtttgtgtcactgtactccagcctggggaacagagcaagatgctctctcaaaaacaaaaagcaagctgggtgtggtggctcctgcctgtaatcacagcactttggaaggctgaggtgggagaactgcttaagcccaggagttcaagaccagtctggacaacatagggggactccatctctcaaaaacaaccaaccaaaacaaagccaaaaaagaacataggccaacatcactaacaaacatagatgtaaaagtcctcaataaaatattaacaaaccatgtttagaaacacatcaaaagagatcattcactatgattaagtgagattcatcccagggatgccagtatggctcaacatatgcaaatcaataaatgtgatccatcacattaaagagaaccaagaacaaaaaccatataatcactccagcaagtgcagaaaaggcatttaataaaagaatgggttgagggagtggagcccatagtcagagcagcagtggtctgggattttggaagtagaaagaagggcagcaccactggccaggaccaccagggaacacccccataggccctgggtgttgtgctccagggagggttccctctggagttattaatcttggtgtccactttgcccagctgcccctcacagggtcagggaggatgaagggaaagcttccttctaatgaaagttcagggactcacagttcctagagcctgtagggagaggaagatcttcgaggaagagcacctgggcattggggcgtttgagaggaagatctatgccaggtccaagtggacaacctgtggactctctctccagggacatacgggtatctgggaatctcctgtagcttaaagaggtaaagacctctccctttagcctgaggactggaggatgctggttcaggtgaatgagtcctgcaggggctggtacaggcctggagggtggtggtgtccagggccttgggttcacccttagcatgattcaggccgggcggtgtttcacatgagcaagagggcctgggttcattgcttcaggacaatggtgaaatctcatggtggaagaaatcttgtccttgccagtgcccagctttcatttggtcttggcccagagtgtcctccctagagaagactcttgtcccttcttcacactgcccttcagggatatgccagccttatgggataagatggggtggagactgtagatgtgggtgggaatctctccacagagtgctccttctctcagcggttgcaccttgtctcagggcttcagcttgaaatctgggatctccaagcccttccctccccagtcctggccaggaccacatgggcagatgcattgtgtgaagtgcatttcatttggggtgtcctctctgcatggcaccctcccgttgattctctttgcgcatgtcagagtgcaggcaccatccacacctcctgctggaggagggacggagctgttgactcctgagagctgatcatgtgttcccaccctcacacacaatcatggtccatcctctgagggacatgtgttgccaccactgtggagatggtgcaactgacagtaacaaacagtaaaatctggtactgaatgggaccttaagccaacaatgacaatgtcattccaaggtgtttcatttttattgattcaatgcaagtcacctgatttcattgactattcacaatagctcgataaagtaaatgcatcatcaccaccactttaaagaggaaaaaggtgcttgggcagtttgtgactactgtggtggctgctgcattgctctctggtaaagccaagtaggtggtgggtgcggcctctgggctgggatgatccaccctcctggtggtggcaggggagccaagctggagccatggcctgtgcagtggtagcagctgaactgaccgctgctgcaggatttgcaagctgttacattttgcgaagccatgaagcacataaaacctcaagtagaacaagtgtttcaaagtctaccaaaatctgccttcagagattattactacagaggtggatatgaacccaaaatgacaaaacgggaagcagcattaatactagataatgaatgaacactagtaatagtagggtaagccctactgccaataaagaaaaaaataagagatgctcattaacatgttatgctcttaaatcacgcagacaaaagagggtctccttatatagtagccacaatcaatgaagctaaagatttactgcaagatcaagctaaaaacagtaggtgtataatgaatttttaacttcatattagtttatgtatatgaatatcaagtttttataataaaatgcctccaaacaaagaatatttgatttagggtttaataacttctaagaggggactcagatgtttcctgtttcacagtcagtctgagagggtcatttttcctggagctgacctgggtggaggcctcacactgatactccccagcatcctctctcctgatggggtttatgctgagcatacagtggccctgggacagctccattctctccatgagtcacagacgctggtcatggaagatccactggataaggttccagagtcatctgtggggcaggtcaggatcacaacatccttttcttctgtgactctggtgttgctgactcagatggggtcggagccactgaccctgtggacaatcagtggaggtgctcaactgaaagtgggctgagggcacgtcttctcctccatccctgggtccttaaggtaactgtggaccccagaccaactgacacaggagctagaaagaaattatttaggaagttagtgagggtaagagcgtccttggcaaggtttcccctttaacaaaaagcagcccaagataattccttttctaacaaagagcagcctgaaaaattgagctacagatgtagatgagcaagatggaagcttgcacaggtgaattccagtaggtgtgccaatagaaaagggctgcctggaagccaggtatgttcaacatggagactccatcctcccttttctccattaccacatgtacagtaaaaaaccaggcaacatggcaccggccaggtagacaatccatctgcatgacaaaagatcagagtggggcagccagcaaatggcacagctggtctaaacaatctttcaccccctgtataaatcagacactgcctcctgaagctcatctataaaaccttctgcatttcactatggaagtggcaacccattttccccaggacccctctctctgtgcagagagctcttctctttctttcccctatgaaacttccactcttaacttcactctgggtgcctgcatcctagttttccatggccatgggacaatgaacctcgagtattaccccagatgaatgatgctgtttcacaatcactggttcagctcccttcttcttagggtttcacagctcggtggggagaataccacgcctcagtggtctggggagtgaggaacaaatgaagaattaatcagattttacttagaacgctatcacctgcctcaaccatcagatccatgttgggaatgtccaggcctcctctcttagatctatacccacttcactggacctgaaatcctgtgtttcccgatgtgttggtgtcactcctatgagaggataaaggagagaactttgctttctctccccactcacaccctgcacaagacagggcccaatatgagacacacactcgctcagtagttctctcatgaaggagggagggagtgacctcgagtgattctgccatctgtagtctgtgtaccctggccagtggctgtatcttcatatgcctcagtttcccctcagtaaaataggacacacaatgagaactaaaaataaaattctaattccccagtgaactgaaaggatggcctcttggccaagcggatcccagagttcctgatcatgacaggatgggaggttacacctcattacagcccctccctttggaagtttagaggtgacaactgactagcattaacgctaaaatcgagatcatgagactgacagaacagactctctgtggccataagataccaaattataaactcaacctaaggtcatgcaggcaagggctaagccacactttcctacatttaaagaataagctatgttctaacacagaattttctttctctctagcggctaaagtaacactagccttcgagataagcaatattgaaatgatcgcggctcatccaccaacactggctaactgacccctgttccaacagccacaactacacttcaattggacaggagactgatttcagtaactttctcctaataagagaccactgagcatggcctggttctgctggtatacagacacggtgcactgagtaccataatgcttgtttcatcttttgatgtataagacctaatttaatacatttaaatctgaattctccaccccaaagtgaacatggggtgcatgtagcatgcatgtttgttgatcacgcatgtgcgtgtacttcctttgtgagtatccatagctccacctataacctgttgaatatgtatacctggccaactcattcagcataaatctatcttccacattcccctcccttgaagtgcctgctattggtctctgctggaggctgcatcttctaccctggggaatggccagcctgcaggctgtaaccctgtgtaagaaataacctggttgggtgcagtggctcacacctgtaatcccagtggtttgggaggttgaagtggtagaatagtttgagctcaggagccagagactagcctgggcagcatagcaagatcctgtctcttaaaaaaattttagggaggagagtgaggatcagaaaaaatacctattggctattatgcttagtacttggatcatgaaataatctgtataccaaacccctgattacatatataacaaacctgcatgcgtatctttgaacctaagataaaagtttgttttaaaaactatctgggtgcagtggtgcatgcctatagttccagctactcgagactgaggtgtgaggagtgcttgagctcgggggattgaggctgcagtgaattatggtcccacctgtgagtagccacttcactcaaacctgggagacagagcaagaaccggtctctaaaaaaaaataaaaatagaaaaataaaatgaaaaatatatgaaataaagtctcctttccaaacgtacagatctccgatttttctgccaacaatgataaatggtcagtggcttgccatgttgtctgtgaattacttttaaaatattcacgatcacctgacctaaaggttggtaccaaggaaccgcctgaatacaccgtctctgattatttgcctccaacagagtgttccctgggcctgatctctggtggacaatgagctgctgggaacatcctctcttctctattcctcccctggggatgctgaccttcccttggagtctcctaagttccccagggcagtcggctaatgtcctagggagcttacctgtcttctccataccaagtctcatgtgaaggacgaggctttgcccttgcccagatgaggctctgggggctgagccctggctggctaccagctgcaagagccatggcccttggacagctggtaaatccttgttcccagtcagccctgcccaagatgcctcaacccagccccggcacaggcttcccagggtcacatggagtcaggatcctgggacaggggactggacaggggtttccagggctgagtttctgaacaggggcttcccaggggtcccctcactccaggatctgacatggtcctacaaggaacgtccatggggaggggacccaggagggggaactgacactgacctccccttactgagcctccccccaaccccatcagactgtccttcctctgtagcaagtgcctgcagggtctggatgcaggaaagaaattctgatctgtggaagtttgtctcccctgtgtgtgtcttgcactaaatgtccaaacccccaaatgggatgtaatgtagagggggacacaggcacagcccaggcctgaaaatcctgtgtgtgtgaagcagaactgacccccaacacccagagctcatgagacatcactgtgtacgtgaaactggccagttacttcttcattcacaagatctgtttttatgacttgtagggtgtaggatcctgtgtcattgttggtgacattctgtatcagcagacatgtattggggtatattgtctctcagcctctgtggcaggtcctggggtaattacttgagttcctagtacatatcctgtaattcccctttgtaccagttgtagccaagcctaaggcagattgtgggtgagtggaagaatctccttgccttctgcagcttcaacagtgacttgggcagtggtaggcaagttccagaaagttaaaagtgaggctaggagtggggagagagcatcagttaatactgggccctatgcattgaggtggaaagatggggccctaggtcctggacaggtctcttcatccctcagccttggagtgtgtgtgtgtgtgtgtgtgtgtgtgtgtgtgtgtgtgtgcgcgcgcgcgcgtgcgtgcgtgtcctactgggccaaggtcagcagcatgacctcccttccttcagtgcctctgaccttggcatttccctgtttggagtccttttccccaggggtctgcctggctccctccctactgccttcaggtcctgctcacattagggcatccttgggagaccccttccctgacacctctagagaccctgggtcttccctttctgacctttcgctgctgtgttccctccagggctcttgtcaatacttgacctcacattctagatacccttgcatgtctgtcttcctccctatgagagcatgagctctgtgagaacagggacttgtgtgatcttggttgcaccccagtgcctgggacaggctgcggactcctgtggatgagctcatgagtgttcccagggcccttcacaacgtgggatttattttccaatggctgaggttgttggctaagagctctgttggagttcaatcaggctggtgggaaaaatattagagatagttatagagatagacacaaatcttcttggaagaccaaaaagtttgcataactttggtaatagatctgactgaaggtggtccctttacctttagttaaacaaattaaagtagtaacaaaggaaggcagagtagtttgtctagccagcttgtttactcatgtgatcttaagactaaccattgatgtgccacaggtgcttaattgctttctacttgggaagtccacaatgtcaattaccctctaacggtgttgactcaagcctttgttaattaatcttactgaataaatatgagtctcactagctgatcaaggccatggtcacaactgtttataggactcagcagggagtctgtaagcggccctgacagactcagctggactggcaaagcaaaatatgtgtgtgtcagtgtacactattcacccgtcccccacagctggtgcccctatatgaggagtgctgccacagagctctgtttagtgtcccttgttttttttcttgagtattaccccaacttaaattgtgattattgtcatctgttttcaacattaactgctcagtgatgattcacttggaaaacattaacaatcgagattgtttcttcactaacaacctcagattatttagattttcctgttgtaatcccttcttcctgtttagtgtccaacagaagccctctgtccctctcaggtccccgttctctccaagaaaccccagccagtctctgtgctccctcctcccatccactcccagggagccctcccctcacctgtgagcagaagcgcctgccagggatgtgcactctgtgaggaggggctgagggaggccccatgggctctgctgtctgctttgtcctcctctgtggagaggagcttgggcttcagaaaataaggaggccagaaagtaaggaacaggctgagaaataatggggatgtgtcgaaaggtcacagatgccaacatctttgtcctatgcaatattatccataaaattacaggtttgagatatgcttaaattttcttctaacatgcattaaaataaacatataacttttaatagttatattaaattgtatttaatataaattaaatgctcttgtcagagctactgtgactgtcagctctgctgtccttcctctctctgtgctaagcctcctcccagggcagaagcacttcccagggccaggggtgggggcggggaaaggtaagtggcaatgaggatctgcacaggtagcctttccgcctcctcccctctcagtcctgcctccttgtcttcttttcctctttttctccaatctacatttcagttccttagaccacgctgtgagaagcaaggcttattgggacccccatcccttaacaggatgacctgtgctccccataagtgacctctgctgtgtctagggattggctctgtcagcacctcacagagagtccctggggcccccaaactcagtgttattttctctatgacacagaaacccctctgggtatgcaaggttttcctcatgttttctaatgtctgggaaggttggatttactcccagcagggaggtcacagagatgtccagggagtggggtcctagaaatggacaaatctagagctaaagcccaggtctacgattttcagttgtttttttctgcagtgctatgtgaccctaatttcctaggagtaactaaaatgcaaacctcagacatttgtagacattttatgatttttctctacagcttgtaccactgttattattatttgctttatgctttttcctaaataaatttactttacaaaacatccttgtcctagtagggtgcaggggctcacgtctgtgatctcagctgcttgagaggttgaggtgggtggattgcttgaggacgggaatttgagacaaaacatctttgtcctatgcaatattatccataaaattacaggtttgagatatgcttaaattttcttctaacatgtattaaaataaacatataacttttaatcatcatattaaattgtatttaatataaatttatatacaatacatttttatataataaattatatatataaatgtatatataatagtttttcttttttgagatggagtctggctctgtctcccaggctggagtgcagtggcacgatctcagctcactgcagcctccgccttctgggttcaaacgattctcctacctcagcctcccgagtagctgggattacaggcgcctgccgccacgcccagctaatttttgtacttttttagtagagatggggtttcgccatgttggccaggctggtctcaaacacctgacttcaggtgatatgccgcctcggcctcccaaagtgctgggattacaggcatgagccaccatgcctggcctatatattttatataattatataaagttttctataataaattttatataataatatataaaatggatatttatttaagataaagttattagttttatatatttacatatatttaggaataaatgtgttactgtgggagcccagtgcccaggcaggtagtcagtacatgatggttgtcattagggttaatactttggaattctggattttttcccaagagagtgtctacgctggaatattgggcttgtggctttctgctgatgtgcatgtgtgaagaagctacttccacttattaggacttgtgtatctgtctcgcagtttcactacctattttctcgtgatgttggtcaagtcgcctaacttttctgtgcctcatttacctaatttgtagaatatgggtaacagtacacaagtgtgagtgtgtatttcccaggactgaccactagagggcgtgaaggcaccggcacttactattacagcaatgggtgtagtagtgctcatggtcgtaaacatcattctcccatgaaaggaaccagggcttcctgggagaaataactgattccagggctggggccggaaagcacaagcggagcctggagcatctcgtgaggccagaaagtaaggagccggctgaaaaataatggagatctgtcgaaaggtcacagatgccaaccagaaggagctttgaatgaccaattttgagacaaaatgagcactataagaaataatgatagtaataaattccaacccataaatacccatgagttcctactaatataaataaataattgaatacataaatatataaggatgaagaaacagctttttcttacagcagaattccaattaatgaatgtagaaggaatgatcaaatagaaaatcactatttggctaacagcacagtcaattgtttgtaggcaagaattatcaatggactttaaatatgaatgggtaaaagtatgatgatgctacaactagtgagtaccaagggggaaaaaaaagtacgttgagaagaaacaggctacttccatattcccaaagtatcacttcaggagctacttattgattataatgggacaaatagtaacttacagtagagaaacctggcaacagagtctctccgaggtacaaaggctctcttcaggaaggaggtaaggggaaggaagaagaaaacactgtcctgcctcaattatttgctttccccattctcaagtgtacttcatagacattcaaagatatgtgttgatagtgtccacgatccacatggctctattatagtcatttattcacacatacattcagtgaggctttgagtgcctaatgtgtgcctgatatttgctagatggtggatgctgagaagatcaggtgtgctgctgtctctagggtgactgaatccacctgccccactttacagatgtggaaattaaagtgaaaaggatttataggattagttcactgtcacaaggtcactagccttaaagttacaggagtaaagcaagtttcctgacttgctagattttctgctgcaggtgctgacaatggtgagctccaataggagagaggacactcagagtgaagtgggagccctgaacaccctggattagccaagaggacatgccgggtccagctgtgaccgcacaaaggaccattggggatatttgtattctctttttcacttagagcttgaaatgaggaaaactaagtgcagaaaaccaagagtggaagatttttcacaaagcactggtaacatgcatcagaaaaccctgtgctgatgtctgtcacggtgtttctcactgaacggtaatagtctggctttgagtgtgttccctctacagcctggagttctgcgaggcagggaccaggtgtgattcatctttgtctctccagtgacagtacacagcaggctctgataaatatttcttacaaaataaaatggaataaaaagtagacatctgcacaggtgtgggatgactgagcagcagcagaagcaggaaaagtcagcgtccccagatcagctgatgtggtgttcggattctagataggggtgaggtgccaggatggggatgggggtcctgtggctctgctgccctgggggacacccctaggtttcacagtgcctgctgtggttgctgcactttgcttccccatgggaaagtgatcagagggtgtggggcttcaggtgaccccatgtgggaaatggccaagggaaggtggggtgggcggcacatggttttttttaaccaatatttgaaggtaggttgtatgaaaaggtgttaggcttatttcagcttatggggagtaggacagggattggtgagtgtgtatcaggtatattttggctcaggatggaaaagaactgtcacagtaacataaggtcttttgggaaattacatgtttactggcagagttcaggccagggctgggtgtctgaaaatacctgtcagggtcacttttatggttacaagggcagagcttggcttggaaccaggtttcttactaataccacatattaagtattataaaaactgtcctttgcaataggacattgctctatgatgcaggttgaggtccctctgtttaagtaattgtgggtggctgtgattctctcatctagtctgcgacttggacttcacctccatctgcagtccctctcctttgctgttgacactggtcagagttaagcgcatttactgacgatggtcacagggtggcagcactgcctctctggtattttctaaaacctcttcctggaactgagccagtctaagaggatgtcatgactaagaaaagggcactaatgaggtgaacagataattttttttttcttgtttctcctgtgaagtaacagagtggaggtgagcatggaataattgccttttagaaatggaagacaatggagagaagtgtttcgcaaaccttaatgtgttcacagatcccacacagatctttttattcaatacagattctgatttttctggtgaggcctgagattgtgcatgtctaaggagcttttggatgatgccattgctgctggttggcggaccacactttgagtagcaaggctcgaagatcatttagaggttaattctcactgcatctaatttatggatgaaaacaaaccaaggtccagagagagcatatacagcttgcctaacaaagccattccctaagtgcctgacttcttgcatttaaacccagggcttcagcctttgtccagttctcactccacacatcacacggtttgttcactgttgtgaacgacagttgtggcagcatctctttagtttaggaatccagagccccaatttcactaccctctttggtcttggctcatgctgtgacttcgaatagttttgcccttacttaaaatcttcagtggctcttttgtaatcacaagatcaagttcgaatatctctgtctagtgttcatggctttataacatatggtatctctttagtaaccttacctaacttccctgttttaaaattgtctcttgctgccatagccctccttgctccttcctgctccctaacaaactgtgttcacttctctctcagtggtagtgatgatggcatggcctctgatgttagactcatgtaacttctaatcccagatccaccaccaacattggcaagttgattcatctttctgaggataagcatcctcctctgaaataaacttagatggcggttgagaggggtaaataaaataacacacaaacccactctcatccctgagaccctcttcaaaactagcatataaaaatagctatttgaagaggttcagtgaaattcaaggtaacacagagaaggaattcagaatcctatcagataaatttaatagactgaaataatttttaaaaatcaggcagaaattctgtagctgaaaaattcaattgacaaaccgaagaatgcactaaatctttcaacagcagaattgatcaagcagaagaaagaatttgtgagcttgaagagataatatatgaaaactcagagtcagagagacaaaagaaaaaagaattaaaagaataatgcatgcctacaaggtttgattattaagctactcaaagagatacaagagaagggtgaaaaccaacataaagaaatgtaaaaaacaatcagaatataaatgaaaaattttctaaaatgctagctagtttttttttgagacaggctcttactctcatcacccatgctggagtgaagtggcacagtcatggctcactgcaggctcaacttcctgggctcagatgattctcccacattagccttccaagtagctaggactaaaggcgtgtgccaccaggccaggctaattttttgtatttttagtagagatggggttttgccatcttacccagggctggtcttgaactcctgggctcaagtgatccaggagattcactgccaaaaaggatataaccaagtcatatagtcataggttatctaaagtcaatgtgaaggcaagaattctaagagcagtgagacaaaagcatcaattaacttataaaggaaaacctatcagtctaacaccagatttctcatcagaaaccttacaaaccagaaggtattggggtcctaatcttttggcttcttaaacagaatagctctcagccaagaatcttgtgtagagtgaaattatatttcaaaatgaaagagagaaatacagtctttttcaggcaagcaaatgcttcaggatttgtcacggctagaccatcctacatggaatgttaaagggacttctaaatcacaaaacaaaagatttaaatagaacagaatagaacctcttgaaaccaaaaaattcaaatggcctataaaacaataacacaataagaaaacaaagtagataacgatcaacatgatgactggaacaaatattaacattgaatgtaaatgacctaacactccacttaaaagacacagattggcaagataaataaaaaatcacaaaccaaatatcagctgtcttcaagagactcacttaacatgtaaggattcttatagactcaaggtaaagagatgataaaagatattccatgcaaatggaaaccataagtgagaaggaatagctatccttatatcatataaaacagactttaagcaacaacagtaagaaaaagacaaataaggcaactatataatgataaaaggatcaatcaaacaagaagatattacaatcctaaatatatatgcacctaactttggagctcccacattcataaaacggttatgatgagacctaagaaaaaagatcaacacaaaacagtgagggtgtcctgggttttctttttattggacagcagtgtactagcctatcactttcccagtcaggggatttttggtctccccattcccctaccatgggttcatgccaaagtccatattttttattagtgtttggaattggattttttttttttgaggtggagtctcgctctgttgcctaggctggagtgtagtggcacgatctcggctcactaacctctgcctcctgggttcaagcaattcttctgcctcagcctcctgagtacctgggactacaggtgcatgccaccacacccagctaatttttgtatttttagtagaaacgagatttcaccatattgtccaggcttgtatagaactcctgacctcatgtgacagggaaacaggcactcagtgaacttcatgcgattgaggagttaatgataatgagagaagggctgtgaggggacagcactggggacaccagagcctgtgacgggctgagttgctgtgccttgggagatgcccttttgactgagccctgggaaggagggggtgtgggggcaggagctgcctgcagagggagtggcctcaggtgggcggccacctggctgcagggaagaggtgacagagttcgtgtgcagagcttggagggtgaggaggaggtgggttgaggtgaccttggtgagggtgaaccatggggggctgtgggccctgctgagggaggccagccagccctggacctacagggtggtttggtcttttttgtcccattcccagcatccactgagtggtgaaactctgcaggccagggaccatcccactggccagaaggagcgcacagtaggtgcccactcagtgcatgttgggctggacagaacctcactctgccccctgcccccagctttgggagctgcagcaaggtccctccccctagggatctccatgcctctgtctctgaggggtgagatggggagacttcaaagggccatctcagagtgtgggggatagagacgcagaagtgtgggggatagagggaggcctgggctctagacccaaaggaccttacacacctcctgagtcttttcaaatggtttcttctgttactttaaaaatgatgtaagtcatcatatttattgtaaatcccaggaatctaatcatgcgtaaaataaggtgtcttatccttgaccccaccccttccccaattaaatttccaggatgttaccactgtttgcagttggtgtgaatctctctttaataatactctgtttatctcacttgtcgttttacgccaaaatacccattgaattatattattgctgaagaccattcttttttttttttttttttttgagatggattcttgctctgttgcccaggctggagtgcaatggtgtgatctcggctcactgcaacctctgcctcctgggttcaagtgattctcctgcctcagcctcctgagtttctgggattacaggtgcacaccaccacacctggctaatttttgtatttttagtaaagacagggtttcaccatgttggtcaggctggtctcgaactcctgacctcatgatccaccctccttggcctcccaaaatgctgggattacaggcatgagccaccacacctgcccagaccattctgttctactgaatcatgtgtggtgggcacctcttatatcaatacatatggattttatcttgtgtttgttattggctcccctttttctcattgcatggctacactcaatgctttgtccacacccctgttcctgggttggaatcttgtgacagaaaatgaagtaacaaaggctaaagctttctaaagtggagtcaggagattgcaagacaattgcactttcaccagcaagagctcaaaccacagaatgttccaatagatttggataaacagctgaagtcagtattcaccagccttcaacatctcaactaggagaaccctaaaattaactaagcacatagaatggaatggacttgtgatttaggattccttctcagccaatgagctgcttctgaaaacaactttttgtggaaattacctgtaaagaaaaccctctcctgtgcttgtcttacagaacactagtcagggctgccctgattcagtggacccgaattgctattatttgtttcctaaacatatggtattttctgtgaccttcatctcaatcttttttttaagttactgggctgtttcccagttttcataatgacgagacattctgcagtgtttcatacacatgtcttttccccatgtggagtattgatccaggagctcattcagtcaacgcatgtttatgaagcatcctgtgccaggctgtgggctggtcactgtcttcagcagagagaggacaggcacagtcttgccttcacagagctcacagctcagggaggctcttagaagtgggatactggtcggagcatgtgcacattaaacatgatgaggtcaaggttgctatagggactaaaccacagtcccaccaagatcgcattgagttcctgtggtagaccagaggtcagggcccctaagatgtcctgagcagctccctctgctcagaagttttggttccacaggtgacacacctgagcacaggtgacccctgcagaacctgtgattaccacccaaagccaagagtgagtggtgggtgttctaggaggaaccgtcacctccatgggcagggttggggaagactgaggggagcaggtggctgatgactttggccagaaggtagggggatgggcaggtgtgcgctcatagggaagggaagagaagggagggcattgcaggcaacaacacaaaggttggaacctgccttcatggactgagaaaagcagggagtccacccaggctgcagctggggagggaagacatggggagcagtgggtctaggggagaagcagactgcgattgaccttggggactgggcagtgagcagaggtgtgttatgtgtgtctgtccccatcatagatatgaggaggggtgaggccgcgggtggcacctgggtcggtgggatttcatagtgcctgctgttccctagagcctctctgtatagagggtcagaatagatctgaggctgtggtctgggggaaggggctggtggtgcttaccatctctaggggtgggaggagagggatgaggatgcccctgagcagtgaagcctcaaggtgtgtggagccacagttgtctctcattagacatgtgttttgcgtgaggatgccagggcctggtggttattactgttgtcaagtttgcatgacaaggacccaggtatccagggatccagagcacagggcccctggtgaggggatgaggctcagatggggctgaccaggttcatgtggtcagagtgggagggactgatggagagacagagcctcaacccctcctgtcaggagctgtggctatgtccaggagagatgacaaggatgacccaggacattgagtgagtcattgagacattgaaggtgaggacagggcagagaggaccctggtgactgctgaaatgtaggatgtgaggagggctctgacccatgcaagttacaggacctccccacccccgagcccacagatgacccttaaattgggcatcctgagtgctgtgtgtgcccagcagggacactggataggctggacctgagtctctgtaagggcagcgctggtctgtaggaccagagtcttctctgtgggtgtgacgtgggcaggaattagcaagatgggggtgacaaggcttggcttggaggatctggtacagaagcccatgggcttggtcagctcagcttctcaggggctcagctggggctggaggagcaggatgctgtgctcagggcatgctccaggcagcgtgatgtgtgtggttccagggtcaggcacgggggtcaaaaattaaccatgaaaagttcccaccttctgtaggcagagaaaatggcctgattgtcagggtcagggagacttaccatgtggccaaagcaggctctcagcctcccagagaccacaccctgggtgcagcactcagctctgcagggtatggcaatagatgtgccaagaaccccaacatccagatgcatgcaaaaattttgcgatatataaaatagagcagatcaagtttccctgcaataacgttgttcctggttgtgtctttttcttgtaaactagacatggacatctttccagcagtctgttctcatctgccaccttcctgctgcagcacctcagaatgaacattcctgagacactgtccgtggtgctgacgaccaagagctatggaacagagtgtgatgtagaatcttctagttacctctgctctcctttcacttttaacaacagagcatcattaacaatgagaaggtggagaggtgttcaggatcttgaagtgacttctgtcttgctctcccataaccctgaagctgctgtagacattattgcagaaactgacaccacagtcaggatggccttgtccaggagcccatgtgcagtttgtagtgagcaaggatgagaaaatggtcttgaaaggggtgatggacagaacaggggcttttcaaaaatgtcacatcatcacccccagcatccgtgaatctgtcacatggtaagagaccttacagattaaatgaaggattatgagtttggaagattattgtagtttatccagatgggtccaacataatcacagaatcccttccttacaaatgagagagggaggtgggagagtcagagaaggaggaggagatgtggggatagatgcagaagacagagcggtgtcaagatgctgcactgctggctttgaagatggagaaagaggacacagccaaggatgcaggaggcctctaggaggtggaaaaggagaggaaacgcactctgccctggagcctccagaaagaacgcagccatgtgggcaccttggttcaagtttctgtgtcacttagcttgtgggaatttgtcacagcctcaacaggaacctacagaggagtcaccttgtgtgcaggtgggatccagggtcatttacagctaaatcctgatgtaaatattgcaggttgcttttcctacttcctatctcatggccaacaaccctggacaatggcagaacacccttggaaaccacggctctgtgctttagtggagggaccagcttgtttgtgggaaggtagcacctggtccaagtgaacctacatgagatcgttactctccccagggccctcagggaagggctgagaacagctggcccaggtgtgtggaggagctgcaggtgaggcagggctggaggggcctgtgggtccaggtagaggggcagacaggttgtcccatcgccatgggagcctgcacgagctttaggttggggaaccctgctcctctgacctggacgctcctgtgtggagaggaggcttgctcagtgagatccacgccagggggtaaattgggaactgatgggaaatgaggggctagagtcctgggtagtgcctgggaggaccttgctcaaggactgaattcttggtctgttcccaccttggttactctgacaacccctctctgtgtcccacggggataaagatctcctgagcagtggccattgggacagaggagaacctggtggccagagctaagcatccaggatcctggatttggggacaggcaagctcattgctgggggacagtgatagatacggcctccagggcctgggtgaagagagcaggagggctcaggacactggaggctgtgtggaggtcacacccacgatctgtaccacccatggatgctcctgcattgctcacctttgtgtggacatcagatggccccaacttttgcactcctgagacatctcatgcattcacagagggacccaggctggggctgtgcatggccttggtctctagggtagtgtgaggacagctgagcactcagctggctgggcaggactcctgcgaatcctgccctttcctgtgtagggtccaccccagcctgactcctaaccccctactcctgtctttccagggaagagagactggggttgagataaggtggagatatttttcctgtgtgacccaggagagaatggacatggagtttcaggtgagtttctgctaagttcccatgagcagaaaaagagccaatgagaggaagtttcccctttattcagatcctttccaggtgaccccgggtgggccataggcccattcactttccctgcaagcccccgcttcctgtggtgatgggaagccttcgccttggcccacccagagcccggggcagtctgttgaggtctctatatattcagcagggacccccatcccttcctgtccccaggcctgtgtctcctcaggactcagagctggttctctggctcaggctccatgtccttccccatccccagggctgggggcttcagggacgctccatcaacccacaggagcagctcccagaggaacctaagaagccacatctgctttgtggtcgatccagcagtaaatgtttgtgtcagagtgtagcaattccagtaaaaacagagaagaggtcttgacccctgaggccttctcagaacagggtctggcatctctctctgggcccacccagggctactctgggactgaacctggctgtgctcagggggttcctgctcccaggcccctccctcctctgctcaccacctcctgttattttcactgcagtttcctgaacttcagctcagccagatgccagtggggacagatcctgggtctccctggggcccaagggaccagaatatctgtggcccccactcacctcatagatgagagcagctgccctggtgctgggtaggggaatctgggcaggggagagaggggtgtcaggggacagggaaggattcctgctgtgtaggaattccagggctctcctcaggtgatggagggtcccagggtggggttagcacagggagtggatgatcctggccctgaacagaggcccagctcatggccagggcaggtctaaccttatccaagtcattctgggtagggtgggtttgtgctggggattgacagtccccctgccctgagcctgcacagctggggccccagtggaaatgggattgggaacggacagtcttacctaggagatggagctgtcagagggtccatggcctggggacagagacaaaagtgagcacgagagtgttaggatagctgggcccctcctgcaagagtgtgtgggggtcctcagttcttagagaattggggagagggagcctttctcaggttattttaggggtcaagtaagcaagtgaggttgaggaagtgacccatgacccagagcccggaggttagggctgacccggccagttggggtttcctgtgtgatgttttatgggatcctctttgcagccccagggatagggtcagaggcccctgggtgtaactggcaggagtggacaacttggggctggcttagtagttcccagccacacccagactgaagggacactcaccgggggtggaggctgggggctgctgctccctgaagtcactctgatcgctggccctaggaaaggtcagggttatttgtgaaggtgcaaggttaaaagtcacaaattggagttaaaataggggaccaggaaaggagcctatttccaagaggggtatggagacctcctttctttatggagttctgtggtaggaggggcccaggtgaggggagttgaggaaaggccttacaaagccacatctgtcctggccagaggggaaggactctcaggcagatgctgggccaggagaacattgatccagtgacacaggaaagggactgaggacccagggaaggaatcagaccaccaggggttgcctgagaggaagggtcaaggcaccagggggaaagcagggccaggcacatgtgcaggacactgaggggactgcatgcatcttggattctcctggaactcagtgtccctgctgtgaccagacactccactcagggctggagatgctgaaatgggacaatgatcttgtcttctgtctctgccctttggcaagagacataaacgacattccaggatatgccatattggggccccggttctcccttctcacagctcagtgtctgcagttaccatgtcagtcaaaggggtgctgaccccacccagcccgtccaggctgttccagtctccactatgtgataatgcccaggatcccccctcagatgccctctcactgggtggatggattcagtgaacagggggaggtaccaggtattgagcaccgctcccccctgctccaggcagctgtggctttgctgtgctaggaaactaggaccatgctcaggggcatggccttaattggactgaattcactgaggacaaagctgttgaggaagcagcccagggtcagcagctggtgaggaaggtgccatggaatgagagggaaggatccctggggagtcgggaggctggggagagcctggcactgaatacaagacagggtctccttccttctcgcctggggtcagcgtgaaggatgggagcagaatggggaaaagctgtggtacctgccagtttttcggaggagcaggaaacacacaagtgcagccaccagaagactcccaaccaggaccccgatcaggatgcctagagtgttgtcatctgctgaaagaagaaggcaaaggggatgaggtccaaatctgttccagggggaaccatgaggggccttgcagggcaggggcatggtcagggaggaaggaaatgccatggagcctgagtgtggtctgttgtgctgtcctcatagctggctcccttgctctccgtggttgcaccattttctgtgtcttaggcttgaattactgggatgcatcaactcctacattctcccacaggaagcctgcacctcatcctgctcctgtgttttttagtccctccttcctctcacatcactcctcttccccctgtttctttttttccatcccatggcagtcgtaaagggcaggcccttgctgccaactcaatgctgatgagcagggatgatgttcattgactgttttcaggggccttccacatggaaggcacagtgggaatcaatctacctgcagcttttctcaccctcccattgccttgagggagaagggtatgtgatattgtgaaatacgtatttggtgttcatcaccattgatatggttaggctctgtatccccacccaaatctcaccttgaattgtaataatccccatgtgttatgggagggaccttgtgggaggtaattgaatcatgagggtgggttttttccatcctgttcttgtgatagtgaataagtctcaggagatcagatggtttcataaagggaagcttccctacacatgtcctcttgcctgctgccatgtaagacatgcctttcaccttccatcatgattgtgagacctctccagccatgtggaattgtgaatcaattaaacctctttcttcatacattaccaagtctcaggtatgtcttcattagcagtgtgagaatggactaatacagtaaattggtaccagctagtggagtgctgctataaagatacctgaaaatgtggaagtgactttggaactgggtaacaggcagaggttggaacagtttggagggctcagaagaagacacaggaaaaaagtttgaaacttcctagagacttgttgaatggttttgattaaaacgctgatagtgatatggacaataaagtccaagctgaggtggtctcagacagagatgaggaacttcttgggaactggaacaaaggtgactcttgttatactctagaaaagagattggtggtattttgcccctgccctagagatctgcagaactttgaacttgagggaaatgatttagggcaactggtggaaaaaaaattctaagcagcaaagtgttcaagatgtgacttgggtactgttaaaaacactcagttttatgtatttacaaaggtatggtttggaattggaacttatgtttaaaagggaagcagagcataaaagtttggaaaatttgcagcctgatgatgcaatagaaaagaaaaatccattttctgaggagaaattcaagccagctgcagaaatgtgcataaacaatgaagagcaaaatgttaatccccaagacaatggcaaaaatgtctccagggcatgtcagagaccttcctggaagccccttccatcacaggactggaggcctaggaggaaaaaatgtttcctgggccaggcccagggctcccctgctgtgtgcggcctagagacttggtgccctgcatcccagccactccagccatggctaaagagggccaaggtacagctggggccatggcttcagagggtgcaagccccaaaccttggcagcttccatgtggtgttgagcctgcaggtgcacagaagtcaaggattgaggtttgggaaccttcgcctagatttcagaggatgtatgaaaatgcttggatgtccaggtgaaagtttgctgcagaagcagagccctcatggagaacctctgctagggaagtgttgaagggaaatgtggggttggaaccccgacacagagtccctactggggcactgcctaatggagctgtgagaagaagaccacaatcctccagaccccagaatggtagatccactaacagcttgcaccatgcacctagaaaagctgcagacactcaacgccagcctatgaaagcagccaggagtggggctgtaccctgcaaagccacaggggtggagcccaaggctatgggagttcagctcttgcatcagtgtgacctggatgtgagacatggatacaaaggagatcatttcagagcattaagatttggctgccctgctggattttgggcttgcatggggcctgtagcccctttgttttggccagtttctcccatttggaatgggtgtatttacccagtgcctgtacacccattatatctaggaagtaactaagcttgcttttgattttacaggcttataggtggaagggacttgccttgtctcagatgaaactttggacttggacttttgggttaatgctggaatgagttaagactttggggaactgttggaaggcatgattagttttgaaatgtgaggacatgagatttgggaggggtcgggtggaatgacatggtttggctcttcttcacccaaatatcaccttgaattttaataatccccacgtgttgggggaaggacccagtgggaggtaactgaatcatgggggtggattcttcccatgctgttctcatgatagtgaataagtctcacaagatctgatggttttagaaaggggagttcctctacacatgccctcttgcctgccgccatgtaagacatgccttttgccttctgccatgatttcaaggcctccccagctatgtggaactgtaagtcaattaaacctcatttttaaaaaaattacccagtctcaggtatgtctttatcagcagccaagaccagctcggtcgcggagatcctaacccagcagtgctagaggaattaaagacacacatagaaatatagaggtgtgaagtgggaaatcagggttctcacaggcttcagagctgagagccccaaacagagatttacccacatatttaataacagcaaaccagtcattagcattgtttctatagatattaaattaactaaaagtatcccttatgggaaaccaagggatgggccgaattaaaggaataggttgggctagttaactgcaacaggaacacgcccttaagatgcagattgctcatgctattgtttgtggcttaagaacgcctttaagcggttttccaccctgggtgggacaggtattccttgccctcattcctgtaaacccataaccttccagcttgggcattagggccattatgaacatgttacagtgctgcagagattttgtttatgaccagttttggggccagtttatggccagattttggggggcttgctcccaacagactaatacacccattttctggtatgtgactctaaagtccttagaatcttcaaagtgatgtctttttcaagctaataattgactgatgactggcagcccctaggcaacttcagaatgaggctggtcactgacccaggtaggattagagggttgggactttcagcctcacccctaatccctggggagggacctggagtttgaattaatcaccaatgaccaatgaatcaattaatggccaatgattgaatcaattaatggccaatgattaaatcaatcatatctatgtcatgaaccccaaaaggactgggtttgaagagctgaacccatggaagtttctggagtgtggtgcatctggggagggcatggaagctccacaccccttcccacatgccatgctctgtgcatctcttcatctgcatcctttgtaaagtcctttattacaaaccggtaagcctaagtatgtgtttccctgagtcctgagagctgtttgagcaaactaatccaacccaaacagggagtcatggaaacctcaatgtgaagccagtcataagaagctctggaggcccagacttgtgactggtgggaaggtggtggcaattttgtgggactgagccctctgctgatatgtccaggtagatagtgtcaggatggaattggaggacacctagctgatgtacggtgcagaactgattggctgctgggtgtgtgggagaaacccccccgcatcacatttggtcacagaagtgtgtctgtgttgatgattgttattgtggagtgagagcagaggaaaaacacagtttgagtttttccaaacagggtggaatcccatctgccaatttagaatctgaaacttatagtttcagtacttcaattaagattgaagtacttcaattcagtacttcaattaagattcagtacttcaattaagattcagtacttcaattaagattacagaactggtaagtgaaagtgatacaacaaaaatgtaaccaaagtctgctcaacttaacagctaataacaacaaagttcataaaaataataccagtcgatattgatagcactgattgagccctggctctgtgcatgaccttgttaagggctttaatcgcattaatctctgaataaatatcctcacaaccaccctgagatccaggtgtttgtaacaattctacagatgaggaaactgaggcccaggaggttgagtgtcttgcccaaggtcaaatacctggtacctattgtaaccaggatgataactggatgagtctaatccctgagttcttacccacattgctccccaggctctgaaggaatctcatccttctcattccgtgtatcattttacaccccccctccctcctaggaaaatatacaaggaaaggagtgagaggggccgagggtcactcacattttacagtcagcttgagggggtcgctcctgttggagctgactgggttggagacctcacactgatactccccagcgtcctcctgcctgatggggtctatggtgagcatatggttaaaccaggacagcttcatcctcttcgtgacctgcagacgctggttgttgaaaatccactggaaagaggttccagtgttatttgtgtggcaggtcaggaccacggagcccttctctgtgactgtggtgctgctggcttggatggagggctgagccactgactctgtggatagagtgaccaacagaaagtgtcttggggccatgctgcatcctcagagatctcagagtcaaatttagaacattctcctgtgaataaaggagaaagatgaaggacagggaggagcagagagaaccagagacacccatagcagcgagcagtagggactacagtgacctcagagaccccagggaccaggaggacccagctgcctcagaccaggaccagggagccctgaaaaccctcccacagatgagcggccccagagtcacatgagatgcaatacctggggtggctttaggagcaggcagtcagagaaatggaacatgggtctcagcccctaagggacaaggaagaggtgtggccagctcctcctaggatcctacatccaggacccagtctgtaaagaggttatgattattcctttcttttttcattaattccctccctccttcatcagagaactactgagtgtgtgtctcagttgggccttgtgcaggtacagggtgtagtgggaagagaaagctgagtcctttccttcatcctcccatgggagtgacatcaacaaatcaagaaattcatgatttcacgtccagtgagggaagaaatgtggatctgatgggagaggcttggacaatcctggcattgagtctgatagttgagacaggtgatttcgttctaagtaaaaactgactaattctccatttgcccgtcattcctcagaccagaatctccctctctgagctgaggatgcccaagaagaaaggagctgaaccaacatctggtcctggggtccacagatgccccacggtggtggccacgaccagattctgggctgcagacacacggtggtgtgacgttgagcactgacagcctgtgtgatgctgatgcaatttctctttaataaaatggggtaaatgtcaatggtccctggcttgccatcctctctgtaaattaacattaaaatatttacaattacctgacctaaagcttggcacagaatagctccaaataaacatcatctattattattttactccaaaaaaaaaaaaaaaagagttctctgggcctgattcctggtggagaaggagcggtccagagtgtcttttctctgctttccctcctcctgaggacagtgcacttcccgggacatcttttaagtttcccatccagtttaatggcctgggaagtttgtttgtctgtcctctccactctgactctcaggtgaaagatgaggctctgcccttgcccagatggggctctgggggctgagccctgcctggtgaccagctctaggaaccacggccctgggacagctggtaaatcgttgctcacaatcagccctgcccaggaagccacaacccagccctggcacaggctccccagggtcatctggagtcaggatcttgggacaggggcctggggcaggggcttgaagggctgagcttctctcagaggatcctcaggccaggccctgactgagtcctataagatctttctcaggtcatgtctatgaggaggaggccaagcggggttggactgagactgattttcccccgctgcatctcccgcatcagactatccttcttgctgtagggaatttccacggagtccggataagggaaaggaattctgatctgttatagtttgtctcccctgggtgtgtcctgcactaaatgcccaaaccccaacatgggacgtaatgcagagggggatgcaggcacagcccaggcctgacaatcctgcgtatgtgaagcagaactgacccccaacacccagaggcacggaggaatcactcaccgtatacacggagatggtgagatgcctgttcaatctgagaatttctgtatgtgacttgtagggtgtagtatcccgtgtcctctagggtgacgttctggaaatgcagatctccactgggtgatattgtctctcgaccgctgtatgcaggccctggagtcctaacgtgagtgtctattacatatgctgcgattagctggttgggctccaccgttttccctttgtaccagccatagctgtaaagattctcgggcagataaaccacagagagatgaacattctccccttcagcaacttcaaagggcgctgatgcaataaagagccaggcagtggtgggtgcgttccagaaagttaaaagtgaggctaggaaagggagagaatatcagtcaatatttgacctatgcattggcatggaaagacggggtcctgggtgcaggtctcttcacccctcagccttagagggtgtgtgtgtgtgtgtgtgtcctactgggtcaaagtcagcagcatgaccctcattccttcagtacctctgaccttggcatttccttgtgtgaaccctctttcccaggggtctgcatggttccctccccactgccttcagttcctactcacacaagggaatccctgggagacttctttcgtgaagcctcctctagagaccctgggtcttccctttctgacctttcccagctctgttccctccagggctcttgtcagcacctgacctcacattctagatctctttgggtgtctgtcttcccccccatgagattgtgagctctgtgagggcatggacttgagtgatgttagttgcaccccagtgcctgggacaggctgcagactcctgtggatgagttcatgagcgttcccagggccttccatatcctggggtttatttgctaatgtctgaggttggcagatgaagacagagtttcatgccctggtggtgtttttatttaaattgtcactgtgatatagttttactatcattttcaaaatgtagtggccactgacaatgaacttgaaaacatggaccaactgagattgttttgccccttggcaattccagttcacttagattttttggttctccttagacgctctctcccctgagtctctaacaaaagccctctgtctcctctcagagccccatcctccccaggagaccccagccagtctctgtgctccctcctcccacccactcccagggagtcctcccctcacctgtgagcaagagcccctgccaggggatgcattctctgtggggacaagctgaggggggccccatggtctctgctgcctgctctgtcctcctctgtggagaggagcttgggctccaggaacgctctagacagggttactgtgactgttgtctctgctgtccttccttcctctatgctgagcttcctctcaggcaggagcacttcccgtttatgggcaagggcggggctctgcctacaatgtctctctgtcccctcccctctcagtcctgcctcccttgtccctcctttctccttcctttttgcctatatttggttccctaggcaaaactttgagaagcaacgctgatggggtcctcataacaggacgacccactctccccagtactgacctctgctgtgttctggccttggttctgtcacagccggtagattatttccctttgtgacacacaaaaccagctgggccctgggtctcctcatgctctccagtgctccaggaaggcagaatgatgcccagcaggaaagtgacagaggtggctctgggggctagaaaggggctcactgggtgatggctgggaaggacccacccgctatcttcagtgtcaccagcctggcctctgacccagggacagagacccaggcctggaggtctcgggaggatccccagctcctaggtgtggagggaggtgtcctgtgtgtcctgggaagagaggactttgatggaaggaggtgggaggctctgggttctgctgtccttggtgaaggtttcagggggaccctctccatgtctggggtctgtgcccccagcttaactctcattctctttgcaaatacatatattttgtggatctgcagttgcctgaactgtctcatgtccctaaatctttgtatccctttttacagaaggtcaggaagggtgtgtacatgagtatgaggactatctgatcagggcgagtgtttgtttcccaaagatctctttagatatggtataatacataagataaatgtactgaattagcaattttaagtgtagaattaaatgatactaattctattcacaatgttgtacaaccatcaccataattttttaccagaaaatcttcattataccaaatggaaacttcatacttttaatcaataactccccacttccccctgccccacccactggtagcctctgatactatcaatctctgtgaatttgcctagtttacatgtctcatataataaggaattatatacgtgtattatttttttctggattatttctcttagggtaacacttttaagattcatccacgtcgtagcatatattacagcttctttcctatttatggctgagtaatatcccaatatatgtttatacctcaattttaattcattcatctcttaatggacatgtgggtggtttccacatttttgctattgtgaaaaccgctgcaatgaacttacacttggaagtatctgtttgggtttctgtgttcatttctttgggggtacatataggagtataaatatggggtcatgtggtagttctatgtttaagtttttgagaaacagccaaactgttttccagtttgctgtgctattttatattcccatcagcaatatacgagggttccattttctctacattcttgtaaacacttactatttaatattttttaaaacttatagccattctagtaggtgtgaagtgatagctcattgcagttttgattttcatttccctggtggctgatgaagttgagcattttttcatgtatttactgacaattttaatattttttagagaactatttattcaaatcatttgctgtttaaaaaaaatgggttatctttttattattcagttgtaatagttctttatatattttagatacaagtcccttatggggtacatgatttgcaaaatttttctcatattctgtgtcttctcactttcttcatggtgttctttgaagcacaaacatttttaactttgatgaagttcacttatctatttttaattttgttacttatgctcttgatgtcatattgaagaaaccattgcccaatccaagatcattaagttttactcctatatgttcttctaatggtttgataagttttgctattccatttaggtttttgaaacattttgagttaacttttgtatgggctgtgaggtaggggtctaactacactatctcgcatgtggttatccagttgttccagcacaatatgaagaggctaccattctttccccattgaggaatcttggcacccatgtcaaaaaccaatgggctgtaatggtgagggtttatttctggactcttgattctattccattgatctctatgtgcattcttgtgccagaagcacactgttttaatgattgtagtgttttagtaagttttcaaattaggaagtgagtcctccaatttttttttccagattgttttggccattctggggtgacttttaaaaaagatgtagttcaatggttctcaaagcaggagtggttcagctctccttttttggcagtctggagacctttttaggaccttaatctaagtagataaattattcccactttcttttctgagttgctatgttacagtgtatattgacacccatgaaataattgagagaccctggaagtgcttgcctacatagtgagggacaattagttccatgatcatgggcacagaagattttgttttgggaaacaattttgttggtggagttatattcatgcttactcttttatttgtcttcatagcctgcatctccttcagacttcatatctgtttattttcttgtttgtcctctggggtttgggtgttgggtgaccagtcagctggagctggaggaggtgcttagcaaggcagtgaccctggttgggaggagcagggctcagcagggtgaaagtagctgggccttgagtcaggagtggcatctggaaggcctgactgtaagggtcagaagggccagcaggtgggtgtcctaggcacaaacggtggctgctgctgtggactggaggaaggtaagaggccccgagtattccatgttcttactggctccccaactgaggattcctctcctgggctggtgctgtcctgcagcagggaggggttagacagggacggctgcacatcaggccggagtccatgtcatcctcttaggcactgtcactacagattgaggattctgttcataagccaagcctttgcacaaggaagggacccgggctctcaaggaagagcagctcctggtcagacctccatctccttctctctcattgcctgaggcctcaagcttggtctacctggcacaggggtctggatcctcctcccagggttggggtcttactgagctgggcacctgcaggtgggagaagatctggaggggccccatctgccttcaccagattgatgttgagggtccctgagtcctgcaccactatcaggtgctgagcaacttccagtgtcagtgacaaccaccccatggtggaagcagaaccacctcgtgagaaagcacctccaagcctcagtgcttgccatgtgtgggaatttgctggtttcagttgggggcatgttggtgggtggtcatgaattcagggccggattctatgctcacagtgcacatgctggatgtggtacagaccccaggcagggctcagtggggtggttttgggtgtgcacaggtatcttttctggaggagctggtggtgatttggctcccagaagttcctgagctctgcagactcaccaagcactcaatatttgagtgaacattgggcgagagagcagaaggtaagtgtcagggcatcggggttggtgcctctgggaagaggaggaacattctgggaacaaagctctcccccggcttacagggagcttcccatcgctcctgccttgaggatcagggaaactagggcctctgctcttccaggggctgcttgcaggcagtttgctctgggagggggtgacccaggagttgcctctcattttgcatttgagatttaaaaggagaagggacagtatatcttgccaggtcacaaaaattacaggcatcatattgactgaagggcactcctgtcatcactgcaatataccagaatggtcttttaaaaaaataagtgatttaggtttaccagcaactgtaatgcttgttttattcttctagttcaccgttaatgtcacttttgtagttttagcactggcaatgttgattttatgttgactctgatgattttaagctttcatttgttcacatagagatcatcttctttctgaatattaatgcattttttctctatttctactggttattcctgtacatagagtagagaatcacttttcccaaggaggtggaaagcttctgactaccaaaaaaaaaaaaaagtgtcaaaatgctttaaagtcagtaacttaaagatcaaatccaagagtgggcaacagattctgcccagggtctgaaaggtggagaggtgactggtgaggatgtttaaaagacctctcctctctactccctaaatgggggccatccagtgttcttgaggttcagagaaggcccagggctggggcagcagggcactgtcagctcccagctcccaggggccaggagtaagaccccaacactgtccagacactgattgcattcattttgggggagagtagattcttatttaaagaataatacaaaagtctacaaatatgaacataaacagaaattcctttgctacaattttccccttaataagacattccttcctaatgacatatgtgactgcattcatggctgagatgttttctaggatggtgagagcatcagagtggactatctggtgccttggggtcatgcattttcttcttccaatgtctacaggatcccccatgtcccactttgtagtgtaactcagtgtgtgtcattctggtttttgttgtatagatccttggaaagcccatgtcattcctgctgtgaggtacaggcagccaaatggcatcatctctaaacatgccttctcctggtacatcaaattatggaataaatgaaagccattttgacagatattgaagatataagtttctactcttcccacacatgcttctcccaagtgaaggattttactggtgaattgttattagagattagtgtggatcagtgactctgccaggggaaattttgccctctaggggacatttggcaaagtctggaaacattgttggttgtcagagctgggggagggagtcctgctggcattgagtgggtggatggtgctgaacaccctgcagttcacagagccccaccagtttgaccacccaaatgtcaatgctgaggagtggagagccctgctgtgccctcccgcagcttccctgaagcttcccctcacctgctcctcccatgtctccccaccacttccccacttcacccgcctccttacacctcagtcccctccacctgaactcaccccttagtccaaggccagccctgatctccgctctcctggtctccttgctccttagcaggaggcgcccactagatggcgcccttgcccttactggagctcaccgtctccctttccaccctgagacaaatgtggctgcttttactgccacaaccccagccctccacactctagatttgctcagggagcagctcctggacagacctcagggaccccagggaggagcctcactctggagattttgatggcatggtctttgaacttcactgttacccccagtcaggatccaggatgttgggagtgcatgattctgcccggtcccacttcagcaggaccccactgctgagttgtctgtggggacccgggcctctcatctccttcttgcattgcaggagagggatcttagcactgctttcacataaagtcagataatggaggagtgcaggtgagtttgggaaggtggacatgaagagaggttgtgtccctagaggtggcagcagtgagaggatgggcaggtgggaggaacacagcccatccagggttgccagccatattaggagcgacagcctttcctctaagcctccagcctttttcctgaaacattccagaactttccacttcagcacttcccactgaggctcctcaggtctgtccctgagctcccagctgagcctacctacccatctgaaatcctgagtcctgtgtcaccctcgttccccattattctgtgcagttctgtgggacgcccagctctcctgacacccccagtcttcagaatggccatcagcgctgtcgctgtggcaccagggtgactgccgcctggaggctgagtcctggcttcctgacagctgtggggcccgctctaggctcccttgtcctgatcattcatcacctccaggatgcacagcagctgggccagggggaggagcagggacaggtgtcagccaccctgtgtgtctgcaagtcaggctgggggtgtgggaggacgccaggaatgactgaactttctgatttagagggtgagagcttgcactgatggaatttgggatttaataggaaaagcatagcgttttcctattttgtaggcagggtggctggagtttggaatcatagattcccctgggatgtcactgtggacctcagtcccacccgttaggggcacagatttcagaatccacaccctggggcaaagcaggcatgggaggctccatcagcctggccagggctctctatttgtgcagctgctgcaaggagatgtgcactctgatgggaacagtgctccctcctccttggggggcagtatctagctccctgcagcccctctccctgcaggccctgccctctctgaacctcaccttccccaacccgccccccgcaatcccatctcagctgtaatcccaacactttctcatccattatgggtggactgcttgagcccaggggttcaagactatgctggctggacaatatagcgagttgttgtctctacaaaaagacaaaaattagctgtgcatggtggcatacacctgtagtcccagtcactcaggaggctgaggtgggaggattgcttgagctggggaggctgagttggcagtgagttgagattgtgccactgtatacttcagtgtaggtaacagagcgagaccctgtctcaaaaaataaaagtaaaaaaaaaaaaagaaatatggaatacattattgttaactctaatcaaccatgctatgcaatagtccaccagtaataccagtaatagccaataatgaattatctgaaaaagaatacaatttattcttagctatctactgctaaaatttttaagctatcttttatgatagctgaaacaaaagaagtaaatttaaccaaggaagtaaaagacctttataatgaaaactgtaaaacattgatgaaataaattgaaaaagacacacgcacaaatagaagatattccatgttcatgaattggaagaactgatattgctaaaatgtccttaccacccaaagtggtctacagattcaatgcaatttctgtcaaaacaccaatgatattcttcgaagaagtagaagatcctaaaattagaaaccacaaaaattcctaaaacctgcacaaaacaccctgagttgccaaagcaatcttaaacaaatagaacaaagctagtggcattacacttcctgacaatcaaagcatactgcaaagctatagtaaccaaatcagcatggtcctggcataaaaacaagcacatagatcaatgaaacagaataaaaatcccagaaataaacccatgcatctctagctaactgattttcagccaaggagccacatgcacacaatggggaaaggacagcctcttcaataagtggtgctggggaattggatattcatatgcagaagaatgaacctagaccctatccctcaccatgcacaaaaaattaactcaaaatgtattaaataaagacttaaatgtaagaactgaaactatgaaactactagaagaaaatatagggggaaaatccatgacattggtctaggcaaagagtttttggataaaatctcaacagcataagcaacaaaaccaaatataaacaaacgggatttcatcaaactaaaaagcttttatacagcaaagaaaaaaaaggccagcagagcaaagagacaacctacaaatgggaggagaatatatttgtaaatatatacatatatatttgtaaatatatacatctgataagaagataatatccaaaatatataagaaaattatgtttctgtatagttttatctgactgggatacagaggccacatccacagtcccatcctcaaaggccacttgttcccaaaatgtcaagcacatccctcaatgatccatcatcaacacctatgtctgtaggatgaagggtgaatcatgaagcactaaaaaggaagaaggaagccaatcccaaaacaaaatgatgcagggtctggaaagtccaaagcattttttttttttttttactgcatcttcctcctttcttctccacattcccaatcctcactattgattaacaaaacaaaaaaaactgggacccaccatcttccctactgtcaggagatctagcgagattgtttgagtcttagaccaaactttgccataagccaaatttctggctgactttacaatgatatgagctagcacagtctctttttctgccagtcaacttgtgctcggttttatttgcaaccaaatagaggtggtaaccaaatataggtgaccctaaaattagtcatcaggatgaaatcctaaaatgtgcaacaaactgggttgaattcaggattagtagcaacatctctgttgtgggcttgaaaagggggcacccttttatgcagtagcaaaattgctaaattgttgtttgctgagtctttggactctcatcccggattttctatgaccattcaaacagggctgcaatgaacatctatggttgtttagcttggcacacttctacatttctatatagtaatatctagaagtgcatttgctcaatcacaagatatgcacattttataattgactgctatcgaactaccttaaatagccttaatttgttctcaacattgtttaacagggtctgtttaatgtcctacgtccagcaaggacagtatcacttttcttaatatttttcaaattattggaccttaacaaatacttaatgtgcaattaattgattcctttgtattcccatgccttcttttatatgtttccttatagtacacaaaaccacattattgtttctttacttgtgtcattccaccctggaccattcctatctaaactataacattatgagagagagagagagagaaaacaatatgaaaatataaattgattaatcaaaaaaatttaaataggacaaatcaggaagacacaagagagattttaaaattattcagagaataccacaatagctgtaccaatatattttaaaacttagatgaaacggacaactatctcgataaatgtaaattaccaaaactgactcatgaaaaaatggatattatgaatagagcaataatcagtaaagcaattaaaaagacagttgataatttttatttactgacaacaataacaaaatttcaggtcctgatatttttatggtgaattttaacaaattttcaagctcctcctcaaccaattctcagaaggtttaaaactttaacaagaaaacactttctaacacattttcagaagctgttatagcatgataccaaaaccacacaagaaaattatagaccaatctcacttacaaatatacatgcaaaatcaaacaaaatcttagtgaaccaaattcagaattaataatagcaaacaagcaaaatatgttatcatacgtatggcttatatcaggaatgcaagtatgtttcaacatcagaaaatacttctccacattaacagactaaaggagaaaaacgcttgtttaattatctcaataggtttttagagaattttgaaaattttataaagttatgcgtattctgtaaaattgatgaaatccaaccttgatttatttttaaaaattgcctttcctatagaattataggtaaaggaaacacatgcatcctcacagagctacttcaaggctaagttacttcccataagtaacgtatcctgtaatgtgtgcttggcacatattcaatactaaacaaatatttgcaaatcctcaaaccacttctcgctcaaataacccacctttgtcttttgcctttatgttagggttgattttctcaattgtatcttggagatcctttggtgggtctttcagcaattaccctgaatttgcttttctgtttacaattttaattcctgggaactctttcttgttctctgactgcacccttttcatgagagttcagccatcaatcctccagaaccccaccccccccgcccccccaaaaagcaataaagatgtctaaaagcttccttctgggctttcgaatgatgtttaccccaggcatttgttctattcgttcatcacccattttccctacaacttgcctacacttgatatcagatttttatttattagtcacctatcttcttcattggcccattttcctattttgccactggttgttctcaaatgtgttatgattcctggttgtacagtcaagtggttgataatcttggatatacgataaagatttgctctgtagctgtgtgtaagcctatataaaagcttttgtatttttcttcttaaaaaagacaaaagatggttgggaagatccctccagttcaccagttcgaggctgcagtgagctatgatagcgccgctgctctagcctgtctgtctgtgaaaaacaaggggggcggggggcgggggggaagactggagatgtaaatctcccgcagggccctacccgtatccgcaacaggtctctaacaggaacagcctcaggcctgtgttggaacaaggtaggttacagaaatctggaagccagatctgtaacttcagggtaaggactggctctcagggctgatcccccgggctgggtgtcccagaggcacccgcccccgccccttccccaaggcaggccaggacaccttcactcctctccttaggctccccacccccttctcctccccactgtgcctcctggagtagcggtggcggtgccacaggggagcggggcggggcgggctctgagggcaagggggatgggccccgccggggtcactggcggccaccctggaaactcgacgcaggccggcccttctagtgaatcgtcccagccacagctggcctcccagccgcgcttggggcgcctcggggcgcgaatggtgcaggttggggagactcaccacgcaccgtcgggggtcggtccggttattcctcaccgctcggctccagtgggcgcgcgggcctctcctcctcagttcctgcgctgcagtccctccctcacccttcgcagcttgggaatccaactgtgtcattccgacggagcgccgtgaggacctccgagggtgttagcgccaagtgatctctgtccagcgctctgaatatccaagtaaaggagttcaatgaagggcgggtcaacggaggagaaaccgtgactctctcaagggagcccaaggcctccttgtctaattagtgacgcgccaatggatggaggctcttcccaccatctcttcccagcatccagtgacaccaccgccaagggacgggctcggcggaacctgcaggaaagaagcatcggctgagcctgactgcagcgctgtgaagagacaggggaggggatcagtagttggtcccgcgcccaccccctgtttccgcgaggggcggagttgactggccatgcaggcagagggcgaaatgtgaaattccactactcctaccgtttttccctgacccgatggggcggagtgtcgtcaggctaagttccctggcggtaaggtggggagattgaggcgcacacctgccgaacggtaacgcaggattagctaaggcgagctcaggacagaagcctcccgaggagcaggagggcaaaataataaataaataaataaataataaataactcactccttggtctttatttgcggcaggaattcagaaggtgaaagcggggccttaggatctttctgaccttttgggttttaagcaggaggtgtcagaaatgttaccacagggctagctggcttgtggccagcaagcgttcacaatgccctcgatttttcatccctctctgtgggttctttttttcattgtaaggcagaatttctacgattgctcacccactcagagaacctgagctggtttagaccaggtgagacaggctaggtttaccctggtgatgatgtgttgttgccatggcgatcctgcccagtaccagaggccctgcagattcagatgcttggtgcctgtgcttggctgaggggccaatgggtgaagctgccatctgcgggatgatgactgaagcctctaagtcagaatccgcccaggctgagccttagggcagctccatggagcctcggctggcctgggatagagagtccaccactgtgccagcccccagccactgcctaggtcctgtgctgagagccccttgtccagggaaatggcgtccagtggaaaagggaccacccccttgcccttcactcaaggcaggttggtgacaaccctgaagctaatccgttcctagaggagctgcttctgggtccgagttttctctgcagcagagcagctccctggatgggatctgttcaaagtccgcctttcacgcggaattttccgtccttgcaattttccacctccaccactaggggatcctctctgaccgcctcatgccggctctggcctctgagcaggggtttctcttctgcatgtgcgaccttgcgcatgcctagtggccttttgggacctagagctgctccacaccccgatggggttacagagtgcctcgcctccactccaccccaccagggttccttccctggctgggatgggatttcagaagcgccgaggaacagcccagacaggtgtgggagagtagccaaggcccctgtcccggggtggccaggacagcggtggcctcgcataggacctggctgggctgctgcaatcagtgtcctgccccttggagagcaacagtgaaaacaacaagactatcttcacccaccttaagaaagaacagaaccagtatccccaactctgctgtgtatcccaacccaattccattccccaccccactctcagtagccaatatgcaaaatattagaatactcttactgttattattttcaaccacactctgcatcctgaaaaaccatatatttcgttatgtgcttttaaacttcttgaaaatgaaatactgaggctgggcgcagtggctgacacctgtaatcccagcacttcgggaggcggaggcaggcggatcacgaggtcaggagatcgagaccatcctggctaacacagtgaaaccccatctctactaaaaatacaaaaaattagccgggcgtggtggcgggcgcctgtagtcccagctacttgggaggctgaggcaggagaacggcgtgaacccgggaggtggagcttgcactgagccgagatcgcgccactgcactccagcctgggcgacagcgccagactctgtctccaaaaaaaaaaagaaaaaagaaatactgaattttcaaatacttgctttttttttcggtcaaaattatgttctcaaatttcactcctgtagatgtgcgtggctggctgtagtttttgcatttttattattaggtattctcctgttgcattaatatgccacattttatttctctcatgtttttggtgaccacttggggtgttttttggttttgtatttttgctgtatacatgctgccatggtggacatacctctttatacatatttcctgttgtatgcagacacaattttaggatgtgacatcttcagcttttctattgtgtcgtgtgtcttttccttcgtgctttgtgttatttacatattctggacacagattctttgtcaactgtatgtgctgcacatctctttcccagtttgtgtcttcttcttcttttttttttcttaaaaaaaactttctttatagtgttttttttttctttctttctttgttttgttttgtttttttgagatggagtcttgctctgtcacctaggctgaagtgcactggccgatctcggctcactgcaacctccgtctcctgggttcaagtgattctcctgcctcagcttcccaagtagctgggattacaggtgcctgtcaccacacccagctaatttttgtatttttagtacagatggggtttcaccatgtttgtcaggctggtctcgaactcctgacctcaggtgatccaccctctttggcctcccaaagtgttgggattacaggcgtgagccacagcacctggcctgtgttctttcttaagtagatgttacttttaatataatagaatgtatcatattttgcttttatattagtactttttctatctaattcaaacacatccccaagggtctttgtgtgtagactgaccaatttctcaagaatcatgaatgaatactgcttctctttccccaatttatctgtaatgctacctttattataaagtttctatgcatgtgtagaaatagttcctgatttttcactctgtgccaccagcataccaatagcacgctgtcttaaatattaaatagcagagctttatgagacaacttgatgtgcagtaggcaattgcccccttgttactcttcttcagggttctttgttgtaccacatgaattttagaattggcttgtccagctaaaagacaactgcaaggattttatttggaagttcataattctatacataatttggggaaagtattttcataataccaagtcttcctattaatgaacacagactctctctctctctcccccacccccacctgtttagttatttatatctttatggtctgttagttattgtttattgtctttcaaccaggtttcatgtttttctacatagaggccttgcatgtgaaagtctttcttcctagcttgctattacaaattttttttaattgcactttttgggtacagtggcttgtactgtaatccccgatacctgggaggctgaggcagatggattgcttgagtccagaagttcaagaccagcctgggcaacataatgaggtccctgtctcaaaaagtttgttttaaaaattgcatttgctgttattcaacaaatgtcattgtgtctcatatatggatttttatatctgataaccttgttcaacaatcttttgattctaacaatatatcagattcttttgagttttccatatagacaataatgtcatctgtaaattataattgtttcttctttgttatttcttggaccttttattttatatttttgtcttgctgcaaggcaatatccctctatatattgtggggtcttttttctcataaagtggggatggtgaacacccttgtcttgctctctgattgtataaagcatgctttctgtagcattttgtagacgctcttttttagattgaggtaattcacttttatttctggtttactgagtttttagcataaattcaggctgaatttgagctaaagctttttctggagacatcatttgaaaaattcatatgatttactttctttaagtcaccaaagttatgatttacattgaactgagtttctactgtttaactgtattcttgggagaaaacccacttgtcactgaacaatatctgttttatttactgctgtcttgtgtctaaattttcttttaggattttttgtatatgctcagattagcctgttattctcctttctgtatttttttctggtttgggggtcaaagttataatagcctcacaataagagctaagaaaccagccctaatggaggccggggcaggaggtttggagttcaagaccagtctgggcaaaatagtgagacccccatctctatgaaaaatagaaattagccaggcatggcagtgagtacctgtagtcctaggtacttgggagggtgaggcaggaggattgcttgagcctaggaatttgaggctgcagcgaactatgattgtgccactgtactccagcctggatgacagagcgagaccctgtctcaaaagaaaaaaaaagaagaaataaaaaggaaaagataaaagagctaagcatctgtttccttttttccattttctgggagagtatgtgtaagactgtaattaactgtttcttgaataatgggagaactctgtaaaataatctggctttggtgttacctgtattggaaggatgaaaaataccaattcagtttcattattggttgatagggctactcatgctttttgttttgttttgttttgttttgtttttgagaggaagtctctctgtattgccctgttgtccaggctgagatgcaacgttgttcacaggcctgatcctggctcactacagcttctaacttccgatctcaatagatcctcccgcctcagccttcccagtagctaggactacaagcatgcagcatcacatccagcctcttttcctgcctgacccagttctggtttcctttagttttctaggtgttcatccattttatctaatgtttaatgcatttggcataagggtgctcagtgtcctttcattgtctgttgtctgtaactgttgccattttcattcctatttatgagtactggcgtcttctctcactttttcttaataatcctgctggaactttgctttttaaagaacatcttttgacttgttgattcttttttcatacatattaactattttcttattttttgcctttatatttatttcttttcctgtttgaaacattgctcttttcttactataaaaatgggtaagtagctcatgaattaccacctcttttaaaaatcttttctactgtaagcattttagcagtttacatttgcccacaagtaccacttcagctacaccctatgtgcttttacataaagtcttcatttttggtaagacatattctcaaattttaattatcacttgtttttaaatccatgatgttttatttgaaatgttgtttctaaagatacattttctggttatacttttattcttctaatttagcacagtggccacaaaacatggtctgtgcagtgcatacaatcgatgagtaatttctgagctgtagtatttggcataatatatggcaaaatttcctaagttttccatgtgtgctttaaaaaacttccagtaaaatacataaatctgttagatcaagcttctcacattgttcaaatagtctatatgtttactgattcatttgactgcttgatttatcaattacaggtaggaatgtattcaaatctcctattaaagtgtgacactcaagtggctttttaaagacagagatgccaaaccaatgaatacatgattttccccaaagcctgcacaaattctctaatgaaattttaccatgaaagtttgtttaattaaggcttactaaagcagtatgttgtcttttactttttaaacagagaatatatattttaatacatcgtttaagtttatgattaattatctattactgaggataagaatctttgcctgtgctcattcagcatttgcacttcatttatgatctgccttctcatagcttctgttaatttttatactagagacatttatttgtttgtataaatgttgaaggtttttttttgttgttgttgtttttgagtcagagcctcgctctgtcacccaggctggagtgcagtggcatgatctcggctcactgcagcctccatctcctgggttaaagtgattctcctgcctcagcctccagagtagctgggactacaggcatgtgccaccaagcaaggctaatattttgtatttttagtagagatggggtttcgtcctgttagccagggtggtctcgatctcctgacctcatgatctacctgcctcggcctcccaaagtgctaggattacaggtgtgagccaccgtgcccagctgggttttttatattataaggagatgtaatagatagatagatgtttcaaagatagtcaaatgtttttaaaatttaaaacacttttttacaggttgactttcaccatttaatttcatctatgtgttttgccttagagaaattttaaatgctatgtagatctcatgacttataattatgaagcattttgttttctgttttccacgaaacttagcttaactttgagcatataatagttgtaaaggtaggagagtaacactgaaaaaaggaattgcataaaaatggcacattttctgtagagttgtttatcgcctgaaaataggccccatttcatggaagtaagatgatcaggctcaggtccccagacgaaactcttggcatggtttttggagatagtccagggctcagtactggctctatcatttgctacttctcccaaagtaaccaatatctcatccaccctgagcccatttccatatctctaacatgaggataatagcatctaccttacacaccaagtagagggatcaaatgtaggaactaaatcaaagtaccagcactgaataacctacatcctcccacttcccaaaaggaagagagatgtatcccctgttgacaaacgagaccattttgcaggagagaaaggaaatgccagttcacttgcaatgtaaacatgctctctctttttagggatgtccagggacctgagagagaacccatgcttaccaaagagtttctagttccagacacacaggactcgaagggtgacaagtatggttttcagggtccctgaatccacccagtcctcacagaaactcctaaaagctgtcgattgacagcgttgagttcacagctctggtcctcacatgctgatactgcttgtgatatcgaacccgacaggaccccacatcacaattgatttaccaactacaatataatacctcctgaatctccaaattggctcacccaggaacaaaggcttggggtaaaactggattaggagatataagctctgaattttctgagggtgagacacacaaggattctaagtgacacgccacagagtaacgggtctgtgactggaggacccacagatttgtcttactggagacaccacatgcacacaaactccatccttagctgtggaaacaagggtcttttgctatcttagccgaattctgggagtaatttttggaggggaggagatctttgggattgcctctttcaggccctttacaaaaatacctacttcttaaatggtaaagcttacactaaactgaaaaaattacatccttggctttttatgaagtaggtgttggattgaatcactactggaagaagtatggcatcgcaaattctaagcagtggtcaaaggatggatctgttaaattagaaaaatctctaaatttataaaaagattttagattcctttattctaaacaattgacctatttgtactcatgggacaatcaaatttcaaaggagatatgtaacgatttcatggcttgcattaaaaatccttctgataaaattaaagataaaaaatctgaccccctgccaaaaaaatcttttgaagttcatactgcctgctttcaatattctgtgggattcacaatgaaaggtgccttatattgtggcctagcttcaagtttatgccttcgccaccatggcctgggttcaattcccagtcagggccccagcgcctttggtttaatgtttgcgtggcatttgacttttttacctatttagtattggtgagattacctttggtaaaaaaaagtttaaagagtggaaatcgcaattctttgtgttggctaaaatctgattataagagatctggaaggttttatttttctttttcaaagagctctatggtcagaagtcggcttcatgaaaagctaatatttaattatatgtacatacagtctttctggattttctcttttgcctcctgttttgaaaaatatttggatttgagtgaaactccgttttagaaattaattgcttggtacaatatacccatgtaactaccctgcacatgtaccccctgaatctataataagagttgaaattttgacaaaataaaattagattttgaattaaaacaaataggtgcttggttcctctgctcacttctttttaaaaggaattcctctcccatgtacttcttcttttcccttctttaccttccttttggcatctttggtatcacatgaagggatctagagggaattttaagtgactctgaaattccttgagaaatacacaaaaagatcccactcaccccttttgggggtctcctgttctccttgtggagtccagagtcagggacaggctcctccaggtctgcagctctgctctcttttatttcatcttggctgattgctttggttttgtgagtaccaggcattactttgtactgtgagagacacgtcctttgtgagtgcaacggctgctgggtcactggtgagggctgcagtttggagatggctgagagccgttgcaataaatggttgtgattgcagggggctccttgtttctttgcaagtttagatgagaaaggtgcagtttggacacagtttaaaggctgtgaaaacaccaccaatgaatatgatttcctttggggatggtctgattaaaagtgggctgattgttgctgtgctactagccttgaagacatgtttctacagcattgtgcagtgtggaaaaattgtgtggcttggtcttgtggcatgtcccttcttttagagacctcagattcaatgtgaaattcgggatttttgattttcaaagatctagatgccctgccttccagatgtgcctactcttcacatattttaaaattagatcctataaactgcaaatactttgttggcttctgtgagatcagaggtccagttagaaaaggaagacagtttgttaaaattaaaaactatttatctaatctaactagattggcctccaaatatgactttctgacattcagctggttactctgaaaagatttctaaatctcttgaggctcatctatatgtttccttgcaaagaaaaaaaaaaaaaaaaaaaagcaagcccaagcactagtaagaaaaagatttgcaatgtttcatgaaaggagtagatgagtgaagcatttatttgtagatactgggttggatacctgtgcaaagaagaagaggtcaataataaaaattgccaggggatttcttggaacttaacaagctgaattaaatatagaaatgtcaggaaatcaaggcaggaaatactcacttgtggttaggcagacagggcagggttctgagcttgagatggagcaaacagttgtggtgggtgaagttcacatgctttagagctcagctgtcctagtaaagaagcctaagagtctctaaagctcttatgagaagatggattttttttgcctagattaaaaggttaaagaattgctttaagttggataaaataaagctaaatgtttaagcaagttgtgaaaggtttatgaaaaaattaattaaaatatttttgtgtgtaaacatattgactaaagttgaaggggtataattcagcatttctgtaaattgagcattgaaataaaaacacaatgggtttctcttagagcactaacctgctctttaacaaaaattgtaaagggttatagaaagtctataaaaatgttaccttatggtcaaacattaaaattgggtaaatatgtctatcaggttttattaagaattaggtttaacattaatagtacactaatgtaaaggtgaaatttggcttatttggtacaaaaatcatacaggaagcattgtgaaatataaaatgatttttagctttctttgggctatatttctataaatatgttattgatgagggttccaaagttatgggagactcctataattctgctatatctcagtgtacattatcagtcataattataattgtcatgttaaattattgtgggccacagaggtaacagatttccttgtcaattgtgtctttgactatgactaccctaaaacgttcagtcacccatatacacatgttaccttgttttggccctctttagaaggtaattttataatcagctataaagccctaacaggtgctcttaaatgcaaattttgataactttggagattgtgacatcagaagagaggaaaaatgttcgggacacttggagagctaaaatgttcattgatatcaagcaggacaggaattaactgcatgaagtgaactaataggaggctgaagtgatctttttgactttttgcttaaaacgttgctgatcctttgttttgcttttcagagtcaaggcaaattttcttttgagctattgacagcttttaacgattaatcaaaatatactcctatgaacaccatttggagcattatttgtttctctctacccgatttccccagaatttggaaactatttgtgggtattcttaatttatggcaatatagttatttgcataagtgcaataagaatgtgttttctttggtaacaggacacaatttgaaaaactggttattttaccaaggttttgaccagaatgctgtgctttcctttaaggaatcaaacttgacttgtggagctaataaagcctttggaaaactgaccttatatcctgtgaacacagtccctgtacagggttactgatctgtgggaagaaaagaatgtcacattctgacaggtcaggaatcccaagttatcttgaaacttcaagaggacaggaattcacccaaccatatgtatttgatggtagaaatccatggcaggggctcagctttaaaaagtcttatctcagattccttctataaaacaaagtcccattaaaaccaattttaaaagcctatgtgaaaaataattattcttgctgcacctcgtacaaataaagtggcaaagcataataaagcaaattggtcctgtcgtaatttgtctttagtaaaaacgggaaactggggtcgggtgcagtggctcactcctgtaatcccagcactttgggaggctgaggtgggcagatcatctgaggtcaggagttcaagaccagcctggccaacatggtgaaaccccatctctacaaaaatacaaaaatgagccgggcatgatggcgggtgcctgtaatcccagctactcaaggggctgaggcagggaagcggaggttacagtgagtcaagatcgtgccacttcacgacagcctgggtgacagagcaagactccatctcaacaacaacaacaaaaaagggtaactggagagagggaagttatgtttcaaaaacttttggaaactatagtacacctgtttttaaattctagtctggcattcagtttttattattttctacagtttgggttaaattcgtatttctctggctacaagtctcctaaataatcttttcatttgtttcctttttctttccctttttccccatttttcttaattggaaatcactgaaacctaagctgtgctttcttaaagccctgtgaactgaagactagacaaccgaaacttctgaaggaagtagcagcaacctatttatatgtgttgctgttgcctactattatgttttagcaggtgctgcctctacacccccgaaacagagagtgctactgggaacaaatcgactttttccactccagtgctgcattcggtgccccataacgatgaccccctctcagcaggaagtagccagaaagattacaatgctccatctccctatgattcttgtgataaataaatatacaagcatgatagaaatcatgcgcaaattgacagtggggattgtggcaggccagatttcactaatggaggtccccatcacaactacttcagtactgactgagtggttaagttcagtatcaaaagctgaaagtgccagcgcctttctacaaaggctagaatgtaacaaaagcccaccaagggttttacctaggcctttcctgggccttacagcatgacaaaacaaagaaggaattcttaaccagacctgtttaggattaaacaaatttaattgggggtctgaagaaactcgccaggcctccacaaacaagttcattgggggtctaaaggaaccccccccaaacctctgtgattgagcaggagacaaggtcagggtaattgccccagcacctggactcatttagatttaagtaaatgtactgaggctccagagaaaggtctccaagacttagactagagttacagattaaaagaagttaatcacttatatctttagataaatgcacactgacacgtagacatacatcttagaaaatatataagctctggaaaaccttgtaatttacagttggtctggagatattttctgggccttctctctgtaaccggttccagaaataaaaaactctcttcctccccagtttatctgcatctcgttattgggccgtgagaaatagcagccagaccctgagtttggtctgggaacacactggctgggcttcctgcctggcggtagagcttcactgtcctccttcccagccaaaatgtggcccttgaaggcttcctccccaactgaccggttttgggttctaggtactcagggaacaccgtcttcaaggaggccattttcatactgttcctggtttgatttttctgaaattaggaaatgccccttgaggcatccaggattgtctttatttcccctgaagcttcccctcctgaagaaaaaagttctcaaacaccctcaggactcaaaccccaagttcaccctgtgaaacattcccatttcctaaacccaggcaggctcatggccctcagcctctcagaccccatggaaacctcctcccccacttcacgggttctctccatattgagagcctcccctcctcggcacacaacccagagactcaccccaacatgtgtagcaaatcaccctggaaacaatcatggctgaacgtggtagcccatgcctgtaatcccagcactttgggaggcccaggaggtggatcacctgaggtcgggagttcgagaccagcgaggccaacatggtgaaacctcgactctactaaaaatacaaagttcactgggcattgtggtgtgtacctgtaatctcaactactcaggaggctgaggcaggagaatcacttaaacctgggagacagagattgcagagagccaagatcgcaccattacactccagcctgggcaagaagagtgaaactacatctaaaaaaaaaaaaaaaaaaaggaaaaggaaaagaaaaaaaaaatcatgaggcaacattgcatttaacaatattttatttatcaaaagacacttgtctttctcaggtaagtgaaggtctagagatgaaacgagtcccgatgtaaattgccccatgggcattgctgagatcacaagatcatcactgcagcatgcagcacaatagtaaatttctcaggatggaagttcaacaatccaaaaggtagtattttttttcatgatgctcagtccatcatacgaaataaaaataaattccttttcatgatcatccattcagtagaaaaaatgatagtaaatttgttctcatgaagatttttaccgtaacatataggatttatcgttattattattattctttgttttttgtttttttgaagcggagtctcactctgttacccagtctggagtgcagtcgtgcgatctgggcacactattaacctccacctccagggttcaagcatttctcctgcctcagcttcccgagtagctgggattacaggcatgcgccaccacacccggctaattttcgtatttttactagagatggggtttcaccgcattggtcgagctggatttgagctccggacctcgggtcatccgcccatctcagcctcccaaagtgctgggattacaggcgtgagccaccgcgcccggcctcaatttatcattattcacgcatccacaaactgggttcttatattttgtacgtgattttttccattgaggagagatatctgtgcatattcatgctgctcatatttcatccacaaactcggttcatatttcatccacaaacataattttttccgttgagaagagatacttgtacatatttatgctgttcaaattcacatttcatcattcttttacaagaaatagataatgtattttaaggttttccagtggtattacagatattttactgggtgtatagatagaaattaaaccaaacttctttgttctggccgccagtcatgcatcctgttttcaacatagttcacatacaactggttgtgtaaaaatgaaattattttgtttagtacaatcatcaacagttggttgattagatttttaattatcaagttaatcattgtcattatgcttctcatcgcactcgtcattaattgctgtgggaggaaatttgttatgttccctatgagagggtgtatcacaaattcaaataagaattcaacgacaatggactgtataaaggaaataagcaagtccatggaaaacatatttttttccggaaaggattaaaatatttttaaaaaggaattaaaaaaaaattgggcacggtggcaaatgcctagagtcccagctgctcaggagatggagacagaaggattgcttgagcccaggaataagttggaggctgtagtgaacagtgattccaccactgtactccagccagggcaatagagggaaaccctctttctaaaaagacaaaaagaaacaaaacaaaacaaaaaaacaccacatcaaaaaacccaacaacaaaatgaaaaaccaaataacagcaatacaattggagctattcgatccaaagaagtaaatgaaacataaagcaaataaaagagaaaagctaatacctgtgtcctgcaggactcagtccaagttctgctctgactccctcctggtgagccaccccttaaaaagtcacttggggcggggttactttgacagacagtcttctgtcaaagagggaggcggtaaatagcacttttttttttttaatttaacgcctttccaacaaattagcggctatgttgtctaagagtgcaaatgtcagaggtgggtacaggcagcaagaccctccccacaggggcagcagaaggaggaatgactaagggaacaagactttagtgtgctcaactacacaggacaggaaacagatgctttttacaaaagctggtggacttgaaggcagaatattttcaagttcctgtaactgcgaactatgacctgtagcctgtgagagtgactttctgtggcaaaggagcttttgtgaatgtgaggaagttaattatcttaacagtgggaggttctcccggcttatctagctagaccctcgtgaaatcccaagtgtccttaggaaggggaagcagagagagatttgagtccagaagaggaagaaggtgatgtgaggcccagtaggggaacaaagggcgatggcatgtaaacacttagcccccagaagtgggagagggctggggttcatcacaccagaatccctaacaatcagccttattttaattacccttgaaatggaaggaggccttagagagccagaggcttggaggggcaccctctgctgcatacacagatcccaactgctgtgggctccaaataattgcaccagggaaatcacaaattatcaaaaataaaggatgtaaagcttttaaaaaatattaaaagcccaacaaataaaaaaagttctaaatctataaaattgacctcagtctgtatatttagatgagtcatgtgtatatagcgtttcacttcaaaatatatgataaatctctcattcattggcttaaaaataaacacttcaatcaagtctttatcagaaaaattgaaacgttaactcaattgccttttagttcatgtgactttacaaaacttaaaacaataaagtcagttttaaaaattattagtaaagtaaaagaaaaatatcttcacaatgtagacattttgtccacatgagacatgtgaaatattgccattactaaatatttgcaggtcaaaaactgtttccaaaacattttaaataatcatctggcctgtctgttttagagcattcaattctagctgaggtctggggacatgtgaaaggagccacggcccgactccgtgctgggaagagtcagacattttccacagctctgtcctttgctgtgggctctgcaactcctaccaattaaaattgcttacgtttttgttttatttttactaaagaggggttcctaaaagctaacattatactgagtatatgtaactaaaactactaagaaaacaatttcacaattatacaaatgtgccaagtaaatgaaaaaataaactgtattttaataaaggttataaaaagaaaaacatatagtggtgtgaggactgtctcaggtcttcactgagcaagggatcatgacattctatggcggacagctgaccttggctttctgctcctcttgattatgtctactaagtgacatacttactctttttccacctgtcttgcctctaagggtaacaggttttatgagatccctcctagtgctttgcaggtcagcctccctttgctgcattccaattttactgcctataccctccagctggcttttgatgacaaaagtcctggtcccagccattctcagattctgtcatccccgtgggcactatggagctcagcactatgggaggttccccaaaaatctcgttttctatgaggaatggccaccacctgcatctcagtgatgctagtgacccctttcctactcctgtgctcactggtcctcatgaagatcctggttggtctgtagccccctatttttcctattaaagagaaattacagtaagacccatttgtgtgcaaaatcaattttaggcttattacacttggcctgataatttgcataaaatgcagcaagaattcatcggccatataggctacttttgagttaattttcctgggtttttacctaaaaatatactattttggttagagtcttgtgaaaataaccaatgtgttcaattgttttattttaaaaggctcttactgaacactataaatatgtataagttgaatatacaaactatattgtcataaaatcacaacccaaaatgtggagaacgcagagggaaaggtaaatttgctcgcaaaaacatacttcacccaaataactggaaaaaaaaaaagactttcatgacccttctttaaccagagcagcagctttcaaacaaggtgtttgccttggaaatgccattcacaagccaaacggcccttgagagctgtctgtcaggcactgtagaatctagcagctcctcacagagttagaaatagtttcaggaaagagattccctgcttttagtaactgcactttatattcccagatagcgagattgtatgtaaaccatttttatcttattctggaactcttttgggtactttttttttttttttttaaatgatggagtctggctctgttgctcaggctggggtgtagtggtgcgatttcagggtatgagaaaatgcagctggacctggctctttccaggaagaccctcacagccaaggagtccaaagcctggggttttcatctaattccagtgtgactggggtaggagcagctttggtgctgggtgtgtgtgtgtgtgtgtgtgtgtgtgtgtgtgtctatgcctgtgtctgtttagggtgttaggctcgtggttgtctagatacaaatgtcccagggctcaggagccccagggttatgtcaggggcaccagatgaaggtgtcaacagaagttagggcacaagggacaaaggtgagagcaaggttagattcatttaggtgcaagaaatcatagagggaggagggagaggaagccctcctgctaccaccgaggaagaagcgcagcttaaggcagaaagcctgtccggagaggaagtgagtttgagggcagggctctctgggtaaagtacggtctgggacaccagcctgggggaagggtacagaatgcagagtggcctggcgtggggactaagaacagaggagagcagctttcactgggagggtcagtgttttcagtgtccagcactgagcaaggtgagatttgggcagcttgctgtgaaataaggtcaggctctggcattgtccccattgcgtgtgtgtgtgaggggcactttgggagagtgaactctccacctccatcctctcatacgtccttcaaccgagcttgccagttaccctgattccaaggagatctatttattgttgacaatactggatcctagcagaggctgggtaggagcctgggcacaagcaagtggaggagggggcctgggcctgaaagacctgggaggtttgagagaggacacagcccacagaatggagcagatggggtagagtcggcaagcattcagggctcctagtaagttggacaatggagaccctgaaagatccagtaaaacggggagaacaaacaggtccccaactcacatccttgcagtgcctggagcttcagactccagacaggtggggaaggaaaattgagggatgtgaacatgttggagaatgtcgtgccctgaagaatgaagaaaaggggggtgaggaatgagagcaggaacggcttccagtgcctggtgcccaggagaactcagaaaatgggtgtggtggagaggaatcgaggaaccggaagtggtggaagtgtgcagggcccctccgagatcactgtgactgccaggcgtcctccctggctggagagcttcactgtcctccttcccagccaaaatgtgtcccttgaaagcttcctccccaatggactggttctgggtcctatatatttgaaggggtggcctgcctctccacacctgtgggtatttctagttgggtgggaggagagacagagaaaagaaataagacacagagacaaagtataaagaaacaacagtgggtccaggggaccagcactcagcacaccaagggcctgcaccggcaccggcctctgagtttcctcagtttttattgattattattttcattatttcagcaaaaaggaatgtagtaggagagcagggtgataataaggagaaggtcaatgaaaaacatgtgagcaaaagaatctatatcataattaagttcaagggaaagtactatgcctggacgtgcactcaggccagatttatgtttctctccacccaaacatctcagtggagtaaagaataacaaggcagtattactgcaaacatgtctcacctcccgccacagggcagcttttctcctatctcagagttgaacaaatgtacaattgggttttacaccgagacattcagttctgaggggcaagcaggagacagtggccttcctccatctcgactgcaagaggctttcctcttttactaatccacctcagcacagaccctttatgggtgttgggctgggggacagtcaggtccttctcatcccatgaggccatatttcagactatcacatggggagaaaccttggacaataccccgctttcaagggcagaggtccctgcggctttccacagtgtattgtgcccctggtttattgagactagagaatggcaatgacctttaccaagtatactgcttgtaaatattttgttaacaaggcacatcctgcacagccctaggtcccttaaaccttgatttcatacaacacatgtttttgtgagctccaagttgggtcaaagtggctgggtcaaagtggctggggcaaagctacaaattaacaacatctcagcaaagccattgttcaaagtacaggtctttttcaaaatggagtctcttatgtctttcctttctacatggacacagtgacagtctgatctctctttcctttccctacatatattcatggaccacagtcttcaaggagtccatttcctcactgtttttggtttgatttctctgaaattaggaaatgccccattgaggcacccaggattgtctttacttcccccagagcttccactcctgaggcaggagcttctcaaacaccccccaagactcaacacctaatttcaccctctgaaaccttcccatttcttaaatccaggcagggtcatggtccttagcccctcagatgctgtggagaccttctttccctttcatacattctctcaagattaaaagccacccctcctcagcacacaccccagagactcaccccaacatgcattgcaaatcaccctggaaacagtcataagaccacactcatttaataatattttatttatcaaaagacactctttctcaggtaagtgaagttctggagaggaaaagaggagtcctgatgtaaattgccctgcaggccttgctgagatcacaaggagattgttactgcagcttgtagcacaatagtaaatttcttctctggatggaagttcaacaatccagatcgtagtatattccttttcattatgctcagtccagcaaatgtgatgataacaaattccttttcatgatcatccattcagcagagaaaatgtttgtaaatgtgttttcatgaagatgtttaccataacatacaggatttaccattatcaatgcatccacaaactctgctgttgttttttatacataattttttccatcgagaagtgatagttgtacatattcatgctgttcatatttcaaccacaaactctgctggtttttttatacgtaattttttccattgagaagtgatacttgtacatatttgtgctgttcatatttcatgtttcatcatccttttacaataaataggttatattgtattttaagtttttctaactgtagtgcagaaattgtactgggtgtatacatagatatcaaaccaaatttacttgttctggctgataatgcatcatttatttcatagattatgtatttctttgacacatttcacgtacaactaattgcataaaaatgaattttcttttagtatagacatcagcatgtgcttaattcggaatttaattgttgagttaaacatcgtcattgccttttccgttgttattaattgctctggtgggaattttgttatctcatacataagacagtgtgccacaatatctcttaaaatttcaatggcaataaactttatatttaaaaacagggaatctatggaaaacacatttttttctaaaggattaaaatatttttttaaaataattttctaaaaagttaggcacggtagcaaacgtctagagtcccagctactcaggaggctgagacaggaggattgcttaagcctacgagttgggggctgcagtgaactgtgattgcaccactacattccagccagggcaatagaagttaaccctttttctaaaaaaaaaaaaaaaagaaagaaagaaagaaaaaaagcaacaacaccaaaacctcaccaacaaaatggtaaagaaaaaaaaaacagcaatacaatgtaagctatttgatccaaagaagtcaatgaaatttaaaacaaatgaaagggaaaaagtaatacttgagtcctgcaggactcagtccaagttctgctgtgcctccctcacggtgagccacccctttagaagtcacttgggtcataagttaacccgataggaagtgtcctggccaatgaactagggaggtggtaaatggcaccattttaaatttaaattcacggccttttcaacggatcagtagccatgttgggtaagagtgcaaatgtcagaggtgaaaagaggcagcaggaccctcccctagtgcttgggcaacagaaggtggaatcactaaggggacaagactttagcatgctcaagtacacaggacagaaaacatgctttttacaaaagctggtaaatatgaagagggaacattttcaagttcctgtaaccaagaactaccgcctgtaaccggtgaaagtgactttctatggcaaaagcgtttttgaaaaggtgaggaagttaaatatcttaatgttgggaggttcttctggtttatctggctagaccctaatggaatcccaagtgtccttatggagcggggagcagagagagagatttgagtccagacgaggaagaaggtgatgtgagtctgggtgcgggacagggggagaatgatgctatgtggggatctgggctggggaatgacttagctgcatgagcggagtgacttagactcctgaactagaagaaatctagggctcatcacctcagcagccctaaccatcaaccttatttttattacaggtcttccatcgacggactccctaaaaagccagcggcgtggaggggcgccctctattggacaaatagatcttgactactttcggccctcaaatagcctgactaggcaaataacaaataataataatttttttttaaatcatggaaaatattttaaaaaacaattaaaaagttataaatctataaaatctgcttctgtctgtgtgtctgtatatttagatgtctcatgtgtacataatgtttcactaccaaaatatatgatgaaaccctcattaatcggcttagaaaactaaacacctaaatattttctcagaaaatacaaaaactttaactcaaatcccttttaattcacctgactttaaaaatctttaaaaaataaagcatgctttaaaattattagtaaagtaaaattagaacatcttcagaatttagacatttggtttaaattatacaggtcaaatactgcccttagtaaatattttcaggtcataaacaactcctgtaatcttttaaataattgaattacatgtctgttttagagctttaagttctagctaaagcctggggacaaatgaagggcaccatgccccctctctgtgctggaaagagacattttctacagctctgacccttgcagtaggctttgcaactgctacctatcaaaattgcctacatcctaagtttattattaaaaggagttgcttggagttaacattataatgaatatatgtaactaaaactatttctcatacaaagtatatgaaaaagtagaatgtatttttaataaaaagttataaaaagacatgaacatgtagtttttataaaaaacagtaattttgtctagttttgcagttctaaaaagttatgttaaattcaaaaataaaaaataacaagacaagactcaaggtttaaataagttgtaaaagatttgtaaaaattagttctataaaaattttacaaaaaaaagcattggttaaaatttaaggaattattttgtttttacagaaattaaacattcattaaaaacactctgatacaaggccttaatttgggttcatgtatcagaatagcagggttttcttagaatattaatctattctttaaaagaactatgaatgttatgcaaactttataaaaatcttaccttagagtcaaactgattaaaattccatagattttacgtaaaattttattaaaaattaacttcaacaaaaataaaatttgattttctcctttaaacaaaagttttgcgtaatattaaataataaagcatttttgtttaccttttaaactataaacacacacacacatacacatacaccaacactaaagtcagctgacctcatactgtctttattggatattcttgtttaaaaaactatcttctttggaaaataaagttttttattttaaaccatattttaaattatcattttgactaaatccataacatacagtgatctgtaataattctattttataatatcaagtgttttgaagaactccaggaacagccatgagagaacactgtggtttagtaacactttatttcctcagtttgaaaatagttgtctttcttggggaggccggtttcagcagatgaaaacaagagtcatgatgaaaattacccagcagtggttagtgtgaccataggaacattgtcatcaggtcagcagaaaacatatcagcaaatttttctcatactggcagtgtgtaggggtggatgtttacagttcctgaagccccagtggtcgtgtggtcttttagttttgccatttataggcaacttgtggtaactagctcaattagacacattccttatcacaaggacagagggctttctgtatcctagggttcttgccttggcattccagaagaatcaggtcacacgtggacgtggagaatgagtgcaaggttttattgagtggaagtagctctcagcagatgggggagccagaaaggagattggtttctccctggattggggccgttcagcagccctggctctcctctgactgccccaggcaaaatccacatcgttctataagtcggtgccctgctggtgtgctggtgcctgttgtcatgttcctcttcatgtccagccgcctgtgtgttcctccgctgatgtgctcctctcgacgtcaagcctcctgtgtgtctgactgctagggtcttggggtttttataagcacaggatgggtcttagcaggccaggatgatcttgggaaagacaacattcggtcaggaaaacaaaaatgcctgttgtcatctaggtccgtggggacaagcccaggtgtggagcttttagccagggaccacagcctcctgtatccaacacttcccttcaccttttctatatcattcaaagggatcatgcccttcccatcccagcacttcactttcatgtcatttgccccctctgaagaggtacatctaactgccattagaatatggatgatgaccagtcttagctgcttcctgctgaaagggggcattgttttgggggaaaacggcagtcagattcctcccaggggtctctataataaaagatcgaggtggctactttcaggaggtcctctaatgtactatctggtcccaagtcccatttctgcaacctcctcctgatgtcaggagctgcctgagtaataattttatcctttaggattatctgtccctcgattgaattaggagatagagaggtgtgatttaccaaggcctctcttagcctctccaggaaggcagtgggattttcatcaaatccctggttaattatggacaacttagtataattgagaggcttggtcttagacctacgtaagccctctattatgcacacctgaaagtgtctcctcttccagtcttccatctcattattgggatcccatttagggtccttcactggtgctacttctcttccagttggataatattcgctcccttccctgatgctataggtgatgcaaagctcatccccaaatctctctgctgctggcagagcagcctgcttctcagtgtctatcaggttctgactcaaaagtaacataacgtctctccaggagagttcaaatgttagggtgaaattctggaaagcttctatatatctatcagggtcatctgaacacttgcccagatctcccttaatttgctttaagtcttgtagggaaaagaggacttggaccttactgggcccaaattcactgggcatctgtaggaggggcaagagtgagactgggcttgtttgggatgaagatttctaggaggggccaggtgagaggctgaagctggatacggaggttggggtggacccagaggagcagggcttgagggagctggcacgtcagctgggggtgcgtctgggactcgtgtctttaattccctgggcttgaccctggcagccttccccgagacagcaaacaggagggctggaacaatcctacatgtcagcaaaggtctggattgctttgcaaggtatagaaagcctgcacatttggggcctcagaccatgtgtcctcacatccagagaaaagttctaattgcaggatggtattgaaatgaatggtcccttcctgaagccaagccagtccttcctgtaaaccataatttggccaaacctatgtgcggagggctatgagatgcttttcctctggattctgagggtcaaaacagtcccaatggttcaggatacactcaaggggagtacaagctgggggtggtgaggagaactggctgcccattctgaaagacagggaatagaggtgttcctcatttcccttccttcttttggcaaaaagctcagggtgtgatggggagggaaagcaagcatcttcacttcactttccacctcttacccctgcgccctggcaaccttggcaggtgccggccacaggtacaaatgcggtatgtacccatgaagcagggagaacctggagattaggaattaactgccctcacctatgtttccttttctccctgctgttgaaaaactttgagttccctgggcctttttatcccatgaggcatggcctccttctgtgggatggggttcagtcagcaggaattggtcctgtccatttacattgtgcctgttgcctggctttgaattcctcagacctgctttctctttctagggcctcagcctgaagcttggaattgagtttgggactgaaaaagcatttcagaggctgtttatatccatttagtgcctcaaataagccctgctgaatttgcaattatcagccagcaggggtcactcctctgttaacttccctattagaaacagagcggtggggattctcacttagaaaagaaaaaaagagaaaaacagttaaagaggcaaaaagtggggaatgctgggggaagaaccccttgcttagtgcaagtgggcccctctaatccttataactttcccatccttcccccagttcagaccaggttgaattccttggccatggaaggaaaggttccattgatgcagtgggtgagaagcactctgtagggtcctggctaccatcggttttctcacacccccctcatcccaggcagtggagggagacacttctgcgacattgctccccctgccccttcatggctattgggtgtggcctttgcctgctgcaggcatgcctaggtgctggagctgggagggaaaagggtaaggagaggtgccctggaagccgctcatgcctggggctgtcaaggtggaggcatacatggcacctctaggaaaaattggtctgatttgcacctttggcggctgagccaaatgctcattttacttagtaacattgcctcagcctgtagcaaaactcttaacattataaaggaagagataagatccatttcaaataatgtgtgagagagaaaagagatgaaaggaaaacagagtcttttacctgcaggaaagggagagaagtggcagagttttggaagaaaggcaggcccaacagtttcccattcactcacactcaccttccgagatcccagacgagccaccagttgaaatgggaaaagtttccttgtccccctcacaggaggtggagtgggggtgtggcttgcttctttagtactccgctgctcaaacctctagggaagcatacagactggcaagttgtggggctacaaccccatggcagcatctaggggtagatgtttacagctgctgaagccccagtggacatgtggtaccatgtgctcttttagttttgccatctataggtggctttgtggtaaccagctcaattagacccattccttaacccaaagacagagggctttctgtatcccgcggttgttacctaggtgtaccagaaaaatcaaatcacacgtggtcttggagaatgagtgcaaggttttattgagtggaagtagctctcagcagatgggggagccaaaagggagaatagttttcccctgaagtcgggttattcagcggcccaggctctcctctggctgccccagccaaactctatgtcaatccattggtcggtggcctgccagagtgctggtgcctgttggtggattcctctcagcgtcgagagtttttccctctcaggaaagggagagaagtggcagccacccatgtgttcttgcactgatgtgctcctctcgacgtccaacctcctgtgtgtctgcctgctagggtcccagagtttttttaggcacaggatagggcatggtgggccagggtgatcttgggaaatgcaacatttggtcaggaaaacaaaaatgcctgtcctcatctaggtccaggggcacaagcccaggtttggagccctagccagggaccccggcctcctctacccatcactttccttcaccttttctgtatcattcaaagggaccatgcccttcccttcccagcacttctcttctgtatcaataggtgatgtttttaaaatttcccaactctagtgcaggcatggtactagacatatacatagaaataaaaccacacttattcttctggctggcaagacatagtatttttgccaaattatgtgttgttttgaagcattttatgtacccctggtcatataaaaataaagctattttgttcagtacaaacagcagcattttctggattagaaagttaatcatcttaaaagatcatcacggatttttccattgcactcatcactaattgctttggcaaaaaatttcttatctcacgcatgacaaaatcagccgcagtatctcctagtaatttaatggtgatgatctttataaaggaaataagcacatcaagggaaaacataattttttttaaaaaaagagtaataaaactttttaaaagtcttttttaaaagactgcttttctaaaatagtaaaataaaactccaccaataaaaccaccaacaaaacagaaaagaaaaaataatgatatgatcggagctatttgatgaaagatggtaaattaaatttaaaatgattagaagagaaaaagcaatacctgtctcccgtaggtctcagtccaggttctgctatgcctttctcctggtgagccacctatttaagagtcgcttaaagcatatgttaatccaacaacagcagattaaaaaccaatgcaatctgaactatttgatctaaaaacataaataaaatttaaaacaaataaaagagaaaaagcagtacctgtgtcctgtaggtctcagtccaagatctgctctgactcccttgtggtgagttagccctttagaagtcacttggggtggggcatatgttaattccactaacattggttctggccaatgagtcaggaaggtggtaaatggcaccttttcttcttgctgatttctttcagttcctttggagtctggacattagtcctttgtcagatgcctagtttgtgactactgtttcctatactgtgggttgtgtgtttaccctgctgatatttcttctgccttgcagaagattttcggtttcattaggtcctattgatcttattctatttttatatttttgcgtttgcttttggggcattagtcatgactacttggcctaagccaatgtctagaaaagctttttggatgctatcttgtagcatttttagactttcaggtcttagatggaagtttttatatgctttgttaaagatcaggtgactgaaagtaccgggctttgtttctcggttctctattctgttccattgctctatgtgcctatttttatacttcctgcaccatttattgaataaagtgtcctttccccaattagtgtttttgcatactttgttgaagattagttgtctgtaagcatttggctttatttctgggttctctattctgttccattgctctatgtgcctatttttatacttcctgcaccatttattgaataaagtatcctttccccaattaatgtttttgtgtactttgttgaagattagttgtctgtaagcatttggctttatttctgggttctctattctgttctattgctctatgtgcatattttataccagtatcatgctattttggtgattgtagccttgtagtataatttaaagcctgccttcagatttgttctttttgcaaagtattgctttggatatgcggtcacgtttttggttttgtataaattttaggattcttttttctagttctgggaaggagaatgatgatattttgatgagaattctactgctctgtagatggctttggagagtatggtcactttcacaatattgattctacctattcataagcttataatgtgttcccatttgtttgtgtcaactgtgatttctttcagcactattttgtagttttccttgtaggaaacttacattaacctacttggttaagtatatttctaagtattttacttattaaaaattctcagggaaatgcaaagtaaaactgaggtgggaaattaaagaaaaataaaattaaaaagaaagggaaataagctttcttgtattaagctaacttgtcccagaggcagcaacaggcacagcccagacccaggaaaagtcttgataatattatttattgtattctggagactcttccagcactccttcaatgtagggagaagaaaaacaaattttcctttgttttatggtatgagtttatagattcttgttctctttaactagtaacttcaagtattctgttttatctaagaagtatggcaaaggtcatgagaagcctgagcaggcctgaactacagctctctaggcaccatagtgaagataaaccaatgcaagcctctttagagcaaaacctagataatagacatctgggttgcatagcaacagttatgtgcaatcctgagttatgaacctgttacaatttgattaactgtctttttcctgcctctgtatccctgctttcacaccactgtaagcttgcttcaagctggcccacccccttttgtgaagtgtgtataaaagtcaagtgctgtctttgttccaggccctgtctttggacgtgagtctgctgggcctgagagcactcaataaaagattctcctgttttaacccaaagcctctctctcatcctcctaaatcccacaacaaaaccacaatgagatgctatcttaatcttgctagaagcccataatttaaaagtcagaaaacaatagatgttggcatagatgtggtcaaaagggagcactttgacactgctagtgggaatttaaactagtccgaccactatggtaaacagtatggggattccttaaagaactaaaagtagaccattcattccagcaatcccattactggctatctacccaaaggaaaagaagttattccataaaaaagacacaagaatatggatgtttatagcagccgattcgcaattgcagtgatatgggaccaacttaagtgcccatcaacgaacgagtggataaagcaaatgtggtacaccatggaataatacttgataataaaaaggaacaaaataatgtcctttgcaacaagttggatggaactggaagccattattctaagtgaagtaactgaggaatggcaaatcaaatattgaatgttttcacttttaaatgagagttaagctatgagaatgcaaaggcataagaatgatataatggacttggggactcagggggaaaggttgggagggggatgaggaataaatgatgacatattgggtatattatacactgctcaggagacagatgcctcaaaatctcagaaattaccactaaggaacttttatccacataaccaaaaaccacatatattccacacactattgaaagaaacataaacattattttaaaaaataaagccacttttaaaattagcaaaataaaataaatatgtcttcagagtttagatattggatccaaattagacagatcaaatactgcctttactaaatattttcatgtcattaacaacttctaaaacctttcaaacagttttttgacatgtcttggaaccatccatttctagctaaggcctgggcacctgtgaaatagggccatgcccccccttatactgggaagagtaagatatttcaagactaagatgttttctacagctccatctttttctttaagctctacatcaaggacataattaaaattggttgtctcctaagtggtttactaaaaatgcatacttaagagttaccattataattaatatttgtatctaaagctacttaaaaattttcacacacaaatctgactgaacaagtaaaatatattttaagtcaaagtttataaaaggacatgagaacatagcttttatgaaaaaattagttttgtcaagtttagaggttttcaaatattttaaattcaggaaataaaataacaaaaagacaaaagaaaatggttgaacaacttagaaaaggtttgttaaaattcatcttataaaacaatctacatgtaaaaagtgggctaaaatttgaaagagattatttaggttttccataaattaatccagaaggggtaggaagtcttaagaatgaggaaggacaggaggaaggggaggtcatcctgacactgcagaggcagaagtgcagctgaaggtatgaaggctaagaggggaggggagtttgagtgctgctgcctggctgtcagagcagaggagggtcctgggcaccagacttgaggaagggatgaaaatgctgggcagacctgtagtgggcccttgagatggcagatagtggtttccagagagagggccattgttttccagtgcccagcactgagcagagagagttttgggcagtgtaaaaaaaaaaagagaacttacctctttctcgttttagaaaaagaacagtctaagaatatcagcagggaaactctcagtgcttcaaggggttaaacgcccttttggctttcttgtgttggtttcatcatagaggaggagaaacttcttggaagtgttcctaaaaacacaacacgtctgcttctcctttcaaaaaaggaagtgctaaaacacgaacactctagatccaaatattaatacggatgtctaaatgcttccgttttccaaggggcagaaagctaaaggttgtaacctattcatttcagtcaaagttggtgaaagggaagcaaaggaactgggtggggcttggaaggatgacgaagctcaagctcattggccagcaacctctctcctgggggcgggaggggtgagcatacgtcattgctttggcttctataaaatgaggaggactcaccgagtgtgaagagtccttctggtgattgcagctgagagcacactcacgacgttctgcaaggattctctgattatgattctgaagggaaaagcgatggaatggacagcagagattgtaattttctttatcttgaattacggaagaaagtatctaggacagaaatccacgacaagtccttggaaccagcagatctcttcgttcacggagacgttgacgtattctctattgaagaagattcttaccttcttactggacaaggttttgtcagttctgcgtgactggattgtccgggagactctgaggaaactgatgtcacatgtttttccaaagaagatgtttctggaaccaacaactgtgattgtggtttgaggacttctgagagttccagtacaggaaataagcagaacatcagctggaggctaaacggatccagacttcactcttcacttcccttcctattcagtctattgtgcctgctgactgagaagcttggctggtatgtgagcaaataaacggaactattcagaaggagatgttgacatattctgtattgaagaagatccttatcttctcacctgacaaggttttgtcagttctgtgtgactggattgtccggaagactctgaggaaactgatgtcacatgtttttccaaagaagatgtttctggaaccaacaactgtgattgtggtttgaggacgcctgggagttccggtatgcgaaataagcagaacatcagctggcggctgaagggatgcagcctccactcttcacttcccttgccattccatctattgtgtctgcctgactgagaagcttggctggtatgtgaggaaataaacggaattataaacaaggagattgtttctcatctacttcattctgttgtggcttttctattttggggttcagggtgtgtgacaaggaccaaggagatgaaaggtttcatgatggagaaagcccaggcaatcagattgaagagctatccacagggaatcttggctgctgaggggctgcaccctgcaacggactgaccatatgacagaaaagggttttaaaggctcaacttctggactgagaacccagagtaatttgggaacctcctctgtgaggagatatgaaagctgggaatcatgacatccctaggaatggaaggcacatttcctgatggaaggggtgctttggaaaacaggagcagagtagacacagcagccttgtggatacgggtgggcagcatgcatgggtgatgtgaacgtggagtgtttgtgatcgaaactcaaaatgtctgacaaagtgaaaacctagaaaccacaatgaggaggaagagtttgtgagggcaatcactctccccatgtgtgaaaatcgggggctcttaaaatctcatctggagaggtgcagtctaccaaactctgggactttagcctccccttttaaaaaaccgtgcatcaataccaacgtccgaaaccacagaaataacacctggcttgcatggagacaaggacaaaaagccgtcatgatgagttgttctgctcacttgctgcctctgttcagtgcacaggatattgtccacccactagcaggctactgcaagagaagtgtgcaatatgttccctatgtgccatatatgtgccatatggcccatatgacaactgagtcagaaaatatctgatgccctcagagttacactccacctggagcttgcccccagccatccaggacctaggctccctaccctgtccaattttctggtgttttgggggcttcattctctaaggtgtgcccactctttactcaaaccaaaacacccacatattcctgcccatgaacaaccaatcaaccacttctcagttccacatcctgctgttgggtctctagtggtgacactgtaactcccaggtcatagtggtgacactataacacctagctaaattgatgccttgtctctaggaggccatgggctcctgcaggtctcatctgactctctgtagccttccctgacaatgctcacaatacccaagccagagccacattgacagcaagctgctctcatcttacctttgccagacctggccactggaaaaggctgaccctcatcctgcaatgcctatacctccaacctttgtctcaagctggtgtcctggagggacttctaagcagaaaacagattcagactcccatcctctcctgaatggcctcatatccaattctcagaccctcagccttcattgtaaggacacttcatccatgcccttgagtattctgtctgcactgtgtattctgcaatagattctcctccctctgcgaccctcaactccttccgcagactttttgttttcttgatcatctaccatagtcttccactgggacactgccaagcccattctggagagtgagttgtgcaagtacactgccccccatctacctttcgggaggtgtatacacccttctttctcccaggtctggaggctttctattttcatcctgaggcatctccacctgctcttggattcttcaaattgacaaccaccagttaacaagaactatgtgtcaccaaatagccaaacaatggcaattacaaaaataaaattaatagctgtaacccccattagcaaggatacacaaatcaaatcagggatagtgggtgaggaagtctgcctaacattcaaggaaggattctgaagtgatacaaaatcattgcctttgctatctttagaatggacactttcagccaggcacagttgctcagcctgtaatcccagcactctgagagccccagttgggtggatcacttgaggccagcagcttgagaccaccctgggcaatgtgcagaaaccccaactctactaaaaatacaaaaatagccagttattgtggcacatgcctgtaatcccaactccttgggaggctgaggcacaagaatcacttgaatctgggagccagagtttgtaatgagcgaagatcatgccactgcactctagcctaggcattagagtgataatctgtctgtggaaaataaaaacattcctcttcaaagttttcttctttaaatcataaatgttggaattaatatatcctctttgaaactcactttcttcaagcttctttatttgatggtagtaaatctttgttaagctttatgaggcaagagtaatggaagaagcatattatatatatttatactctaacctcagtgcttgttctagcaagctcaggcatgcgtgaatgtgcccaggcatgttccagcccataccttatatcctttccttattgggaaatgctgttactcctataagcattcttgtaagcaacttcctctttttctttgtctccactatctttacctattgaggacagttttaggttcttagccagttggatgtagcatagactgtgaggtccaaccccagccaatggagatagcacacagcagtagcgacctcatgcttaacagataaatattcctgtctccctttgtttggggtgctctcagctgatgagcaacaccctttctaaagaaattaaagttgtcttgctgagaaaacttttggtctaaatgctgattcttccttgcagcactgaagaagaagcaattatttccaacactttctcatacacaaaaaaagaagaaggtggaagaaaactttcttgtgcaccctatccctcactcagaaagacaacagaaggctcctagtggcaagccctagaggattcatttcttttgggaaccctcttggctgggatactaggactcaggtcaaactcagcattttcagtgtgtgggaagtgtgcttgggtttcactgttacttccaataatgtgatttggtccttggggttcaccaaattttggtatggagtggtgaaccctgttaagtttaagtgtctataaaattaacaaagcaaaataaccattctgccccatggttcagagaccaaatattgtgtaggaaatgctttagcgagagaaacagagaagaataaaaaatgtcctcaagcgctgcattatttcttgttatcgtccagatcttagaggaaaggctttcattttccctcattcagtatgatattagctgtgcatctgtcatttatggcttttattatgttggggtatgttccctgtgtatgtagttttttcagggtttttgttatgaagtgatgttgaactttatcaaacgtttttcagtttcagttgaaacgatcatatgctttttgtccttcattctcttgatatgatgcatcatgttgatgatttccatatggtgcactgtccttgcatcctgggcatgaattccacttgatcatgacaaatgaatttttaatgcattcttgaattccgtttgctggtattttgttgaggatttttgcatcaatattcatcagagatattggcctgcagtttctttttttttcttttttctttgttttgttgtttgtttgtttgtttgttttgatgtgtctatgtctggttttggtatctgggtagtagtgttccatccccttttattttttagaataatttgaataagactggtgttggttctttaaatatttggtagaattccgaagtgaagtcattgggccccgggcttttctttagtggaaggctgtttattatggcttcaatctcgttacttattattggtctattcatgttttgaatttgttccttatttaatcttggtaggctgtgtgtatctaggaatttgtccatttcttttagattttcaaatttattggcacataattgcccattgtagcctctaatcgtcatttgagttcctgcagtaccaattataatgtctccttcttcatttttgattgtatttatttggatcctgcccctttttttcttacttaggctgcctaataatttcttaattttgttgaactttttcttttgtttgtctcgctctgccaccaggctggagtgtagtggtgtgatcttggctcactggaacctccgtctcccaggttcaagcaattctcctgcctcaccctcccaaatagctgggactacaggcaagtgccaccactcccagctaatttttgtatttttagtagacacgggttttcaccatgttggccaggatggtctcgatctcttgacttcataatccacctgcctcagcctcccaaagtgctgggattacaggcatgagccactgcgcccagcctaattttgtttaaattttcaagaaatcaacttcttctttcattgatttctgtattttttatttccattttatttatttaaactctaagctttattctatcttcttctcattttagctttggtatgcttattgcctctctagctctttaatgtgcattgttagattgtttatttgaagttcttcctctctacaccataagacgtaagcatgtcctcattatgtcataagatgtaaccacttacagctataaacttccttcttagttctgcttttgctgtatctcataggctttgttatgttgtgtttccattatcaattgtgtcagaaatttttcaatatttttcttaatttcttcattgagcaactgatcatttgggagcatatttttaaacttccatgtacttacatagtttccaaaatacctcttgtgatcaatttctagttttattccactatggttcaagaagatgcttgatattatttcaattttttttcacattttaagatgtgttttgtgacctaacatatggtctactttttttttttattaaactttaagttgtggggtacatgtgtagaccgtgcagttttgttacataggtatacacgtgccatggtggtttgctgctcccattaacctgtcatctacattaggtacttctcataatgctatccctcccctaacctccaccctctgacaggacctggtgtgtgatgttcccctccctgtgtccatgtgatctatttttgagaatgatccatgtggattagaatgctgtggaaaagactttggattcctaatatccagggagggagacgatgatattactttcaatatcacacgggtgtacacactctctgtgacattgttcctaatatccagtggaagagaggatgatataacacccagggagggagaggatgatattactcttaatattgcagggtgtgtacccatgcctatgatattgttcctaatatcaggagggggagaggatgatattactcagaatatggcagggggtgtacacacactctgtgacatggttcttaatatacaggggagaatgggacaatattactctcaatatcgcagggggcgtacaaccctgtgatttgttcctaatatacaaaaggggacagtatgatattgttcctaaaatcgcagaaggtgtacaacgccctgtgatattgttcctaatatccagggcgggagaggatgatattacccccaatatcacagggggtgtgcactttccctgttacattgttcctatgatccgagtggggggaaatgacattagtcccaatatcgcaggatgtgtacactactcccccatgatattgttcctaatatcaagggggagagaggaggatattactcccaatatcgcaagggaggtacatcctccatgcaatattgttcgtaatattcaggaggagagaggaagatattactctcaatatcgcagaaagtggacacccaccctgtgatgttcttcataatatccagggaagcagacgattatatgactttcaatatcgctgggagtgtacatcccttttgggatattgtttctaatatccaggaagggagaggattatattacttccagtattgcagccagtgtacacatttcttgtgatattgttcctaatatccagaaagggaaaggatgatattactcccaatattgcaggtggtgtacacccccctctgatattgttccttacatcaaggaaaagaaagaagaatattactcccaatatcgaagagagtgtacacccctcctgtgatattgtatttaatatccatggggaaagaggatgttgttactcccaatatcgcagggggtttacacccacactgtgatattgttcctaaaatccagtgaaggagaaaataatattgctcccaatattgcagggtgtatacaggccctcccccgttatattgctcctaatatccagcggtggagaggatattactttcaatttttgcagggagtgtgtaccccctctctgatatttttctaatatcaaggatgggaaaggatgccattactcccaatatcgcaggaggtgtacatgccctgtgatattgttcctaatatccagggaggtagaggatgatattactttcaatattgcaggggctgtacaccctctatgatgttgttattaatatttaggttgggagaaaatgatatttttcctaatatcctgggaaggaaaggatgatattactgtaaatattccagggagtgtacaccttcctaatattctaatattgttcctaatatccaggggtgggagaggattatattactcccaatatcgcagtgggtgtacacccctcctgtgatgttgtttctaatatccaagcgaggagaaaatgatatcactctcaataccgcagggggtgtacaccttccccatcatatcgttcctaatattcagagggaaagaagatgatgttactttcaatatcgcaggggttgtacacaacccctgtgatatttctcctaatatccaggaagaaagaggatgatattgctcccattatagcagacggtatacgcctccctgtaacattgtttctaatatcaagactgggagaggatgatatcacttccagtatcgcaaggggtgtacacctcccccgtgatattgttactaatatccagggggaagaggataatattactttcaatattgcaggggctgtacacccccgtgatattgttgttaatatttaggttgggagaaaatgatattagtccaaatatcgcagagagtgtacacacttccgataatattgttcttaatatccatgggggagacgatgatattacacccaatatcgcagggggtgtagtctccccttgtgatattgtccctaatattcagggaagtaaacgatgatgttagtgtgaatattccagggagtgtacaccccctttgtgatattgtcctaatatccgcaggagagaagataatattactcccaatatcgcagggggtgaacacaccccctgtgatattgtttctaatatccaagcgaggagaaaataatattactcccaatgtctcaggggatatacaccttccctatgatattgtttctaatattcaggtggaaaacgggtgatattactcctaatatccaggaagaaaggggattatgttactccccttatagcagggggtatacacctcccctgtaatattgttcctaatatcaaggctgggatatacgtggggggaaggatgatattactcccaatatcacaggggttataaaaccttctgtgatattgctcctaataaccatggcggaagaagatgatattactcctaatattgcaggaggtgtacactcccccattatgttgttcctagtatgcagaaaaggagaggatgacattattgccaatatcgcagggtgtgtacaccacccatgatattgttcctaatatttagagggacagaggatgatattactcccaatatcgcagggggtgtacacgcatcccctgtgatattgttcttgaaatcgaggggaaagagaattatatttctctaaatattgcagagggtgtacaccgccccctgtgatattgttcctaatagccgggggcggggggagataattaaattactttcaatatctcagagagtgtacatcccccttgtgacattgttcctaatatccagagcaaaagagaatgatattcctcccagtatcgcaggaagtgtacatttaacctgtaatattgtttctaatatccagggggaagagaatagtaatactcccaatatcgtaggggttgtacaccttttctgtgatattgttgcaaatatttagaagagagagagaatattactcgcaatatcacagggaatgtatacttcccctgtgatattgttctaatatctagaaaaagagaggataatattactcctaatattgcagggggtgtacacccccacttgtgatattgttcctaatataaaggaaggtcgaaaaacaaacggggagcccagggggaaggaaggcaggcgaggaagaggcagcgccggggcgccggagggagcagccgggccgcggaagcgcgagcacgagaccggtcgcggtcgcagtcgcatttttgccgttgtcgcggccgccgccgccgaggcttacccggggatgtctgagcccgcgcctcgcggcccccaagctccacgctgcgcccgctgtcccggcctctaagggccgccacgtccctgcggcgcgcgcaggcagaaagcggcttcgtgccggcggagggggcccgggcgggccgggaaaggctgccccaggccccgcgcctaccccatcaccgcggccggcgccgggccgggaggatgagcggtgtggggctctgaagcatggagggggttttgtacaagtggaccaactatctcacaggttggcagcctcgttggtttgttttagataatggaatcttatcctattatgattcacaagatgatgtttgcaaagggagcaaaggaagcataaagatggcagtttgtgaaattaaaggtgacagctttggaggggaccacccttgattggatacataaattctgttcattcagcagacaacacaagaatggaattaatcattcctggagagcagcatttctacatgaaggcagtgaacgcagctgaaagacagaggtggctggtcgctctggggagctccaaagcatgtttgactgatacaaggactaaaaacgaaaaagaaagaagtgaaaccagtgaatcgctgaaaaccaaaatgtctgaacttcgcctctactgtgacctcttaatgcagcaagttcatacgatacaggaatttgttcaccacgatgagaatcattcatctcctagtgcagagaacatcaatgaagcctcttctctgcttagtgccacgtgtaacacgttcatcacaacgcttgaggaatgtgtgaagatagccaatgccaggtttaaacctgagatgtttcaacggcaccatccggatcccttagtttctcctgtgtcaccttctcctgttcaaatgaggaagcgttctgtcagccaccctggttcttgcaccagggaggagtagccactgtataaaagaaccagtatctgcacttcaccgactctcccagcgacgccgaagaacctactcagatacagattcttgtagtgatattcctcttgaagacccagatagacctgttcactgttcaaaaaatacacttaatggagatttggcatcagcaaccattcctgaagaaagcagacttatggccaaaaaacaatctgaatcagaagatactcttccatccttctcttcctgaagaaactgtagtgtccaactttctctaagtattgctatgcaaaagctgctgtaattgaactattgttatagggagtagttttttcccttaggactctgcactttatagaatattgtaaaacagacaaacaagaaaacaaaccacatacttttgaagcgtgttttatctttatatagtttgtttgcaagagtattttcctaataacttcacagtatgaatgtgcatcttttttttctttttttaacaaatgatggtgtaacattttgacatccataaggacaaatgtagatatttttctaaaaaaccgtgaggggactgacagcttggtcagggtgtattgtagcttataaacatgaaatcttacaaggtttcagtttgacagaagtgtgatatatgtaacttgtgccatggaccaaatggtcactttaccacagctaaaaatgagttatgatagcagcttgatggtgattgcattgtattcctttaatcaaaaaggaaacgcaatattctaagtatctttagcccaaataccatgacatattgagcatctttaaataaccagactgtattgtccttcatatgtgaagttgacactactgatttgtcaataccaaattttgggttaaagtgtttaatttttatttatttattttcttgttgcctcaaaagatgattgcattctaacttttgtgacctaccaaatttaagatgtgtatacattgttctttacgttgttctagaaaagagattttaatgctgtagtgacttagctcacttacatcagagaaataaacaactttcaatggaaaaaaatatatataaaggaaggaagaggatgatattacttctcatatagaaggggttgtacaccccccttgtgatattgttcctaatattcagggagggagaggattatattactcccaatatagcagggagtgtacacccccccccccgtgataatgttcctaatattcagggaagcagaggatgatattactttcaatatcacagggggtgtgctgtccccctgttatattgttcttaatattcaggggggagaggatattattatgcccgatatcacaggagaagtacaccccacaagtgatattgttcctaatatccaggggtaaagaggatgatatcgcaggtggtgtacacccctccccgtgatattgtttctaatataaagaaggagagagcatgatattactcccaatatcgctggaggtctacaccccccttgtgatactgttcctaatatccaggaagggaaacaatgatattgctgtgaatattccagggggtgtacacccctttgtaatattgttcctcatatccagggggtagagaggatgatattactcccaatatcgcagggggtgcacggccccactgtgatattgtttttcatatccaggaggggagaggatgacattactctcaatatggcagggggcgaacaccccctgtgatattgtgctagttaggttgggagaaaatgatattactcccaatatcgcagggggtgtacaccgctcctgtgatattgttcctaatatccatgacgggagaggatattactcccaatatcgcagggggtgtacctctcccctgtgggattgttcacagtatccaaaagggaagaggatgatgttactcccaatatcacagggagtgtacaccaccattgtgatattgttcctaatagccagggaagaaaacgatgatattattgtgaatattacagggggtgtacacaccccctgtgatatggtttttaatatacaggttggaaaaggatgatattactcccaatatcacaaaaggtgtacacacccccccatgatattgttcttaatacttcggtggggagaaaatgatattagtctccatatcacaggggtgtgaactcctccggtgatattgtttttaatatcaagaggggaggagatgatattgctttcaatatcgctgggggtgtacatccctcctgtgatattgttccttatatccaggcgaggggaaaataatattactcccaatagtacacaccccatgtggtattgttcctaatactcagggggaaagaagataatattactttcaatatcacagggtttgtacacctttcctgtggtatagttttcaatatccagggggaaggtacatgatattactcccattgcagcaaggggtgtacacacctcctgtgatattgttcctaatatccagaagtggtgaggatgatattactcccagggggtgtacaccccacctatgatattgtttctaatatccaggggaaaagagtgtgatattatgcccaatatcgcagagggtgtacacttatcctgggatattgtttctagtatttggggagggaggagaggatgctattattctcaatatcgcagaaattgtacacccccgctgtgatattcttcataataatcagggaaaaagaggatgatattactaccaatattgcagggggttacacttcccctttggtagtgttcctaatatccaggaagaaagaggatgatattaatcccattttccaggaagtgtacacccaccgtgtcatgttgttcctaatatccagcagggaagaggatgatattactcccaatatcggagagggtgtacacttcccctgttatattgtttctaatacccagggggaagaaggatgacattactgccaatatcacagggtgtgtaccccaccctgctattgttcctaatattcaaaaggaaagatgaaaatattactcccaatatctcagggtgtgtacacctctcctgtgatatcgttcctaatatccacaggaagagagaatattactctcaatattgcaggggggtgtacacccccctgtgatattgttccaaatattcgggcggggagaggatgatattagtcccaatatcgcagggggtgtgcaccaacctgtgatattgttcctaatatccatgcgggggaggacgatatcactctcaatgtcgcaggaagtgtacacctctcttgttatatttttcttaatatccaggagggaaaagatgatattactgccaatatcgcagggtgtgtccaccccccttttatattgttcctaatatccaatggaaaagaggatgacattgctctccatatcccagaaggtgtacaacgcccctgtaatattgttcctaatattttgggggaagagaggatgatataacttataatatcacaggaggtgtacaccacccctatgtattgttcctaatatcctttaagggagaggatgatattactcccaatatctcaggtggtgcctattccccctgtgatattgtttttaatatccaggggaagagagtatgatattacgcccaatatcgcagggggcatacaccctctctgagatattgttcataatatatagagggagagaggatgatattacttccaatatcagaggtggggtacaccccccggttatattattcttgatatccaggaggggagaggttgatattactggatatatagcagggagtgttcacatcttctgtgatactgttcctaatatccagaaaagtagaggatgatattactcccaatatcgcagaacgtgtacacctccctgtgatattgatcctaacattcaaaggggagaggatgatattactcaaaacatcacagggcatgtacactcccctgtgatattgttcctagtatccagaagggagcaagataatattactttcaatatcgcagggggtgtacacccctctttggtatgtttcctaatatccagaaggaaagagggtgctattactttccatattgcaaggggtgtacacccccctgtggtatggttcataatatccagggagggaaagggtgctattattccccatatcgcgaggcatgtacaccctgctgcggtacggttcctaatatccagggggaaagaggatgctattacttcccatatcgcggggtgtgtacacccccgtgtggtatgttttgtaatctccgggaacgaagagggtgttattacccctcatatcgctggaaatgtacactcccctgtggtacggttcacaatatccaggggattgagggtgctattactccccatatcgcggggggagtgcacctccctgtggtatggttcgaaatatccagggtaagagagggtgctattattccccattttgcaggaggcgtacacccctctatggtatgttttgtaatatcccaggtaaggggtgctattgagagaagagagcaaaagaccccccccatattgttctgtattattttatactcagtacctgttttaagaagaaacaaggaagcgaaaccaaaggcaggcagcccggcgccaggcaccagatccaaaaccagacccgaaaccaggcctgggccttcctgaccttagcctgaaagttaaaattcaacccatgacctagcaactgatgttatccatagattccagacattgtatggaaggacattgtgaaatttcttgttctgttctgtttcactctgagtactggtgcatgcagcccttgtcacatacccactagattgctcaatcaatcatggccctttcatgtaaaaaccttagtgttgtgagcccttaaaaaggacagaaattgtgcactcaacaagcttggattttgatactctagtctgctgatgcttccagctgattaaaagccacttccttcactacctcggtgtctgtgggattttgtccgcggctcctcctgctacactgtgactccccttatagagaggggtgtacacccccctttggttcctaatatccagcgggggagtaggtgctattactccccatattgcggggagtgtacacccccttgtagtacggatcgtaaaatcaaggagggagagaaggtgtaattatccccatatcacagggagtgtacacccctttgtggtatagtttgtaatatccacgacgggagagaatgctattactccccatatcgtggagggtgtacaccgccctgtagtatggttcgtaatatccggaaggggagaggttgctattactccccatatggtgggaagtgtacacccccatgtgatatggttcataatatccaggggggtagaggatgatattacccacaatatcatagaaggtgcacacccttttgtgatattgtccataaaatccagaaggggagaggatgatattacttccaatatcacagggggtgtgtagccccatatgatattgtttgtaatatcaaggtagggagaggatgctattccttacaatagctcaaggggtgtaaccttcttgtgatattgtttgtaatatccagaaggggagaagataatttttttattttaaaagtaaactttaatgtcaaaaatgcaaacttgagaagggcagaaagatcaaacagaaggctgccacttcacaattggagggttgcacagtggccgggcagaggcgctcctcactccccagacggtgaggcagccgggcagaggtgctcctcacttccgagatgttgcaggagccgggcagaggtgctcctcacttcccagaacagggggctgccgggcagaggtgctcctcactgcccagacggtttgcaggcctggcagaggcactcctcacttcccaaacggagcagcggcaagccagaggcgctccacacttcccagatggtggggcagccgggcagaggcgatcctcacttctcagagggtagggcggcccagcagaggcgctcctcacttcccacatggtggggcggcaggctagaggcgatcctcacttcccagacggtggtgtggccatgcagaggtgctcctcacttcccagatggtgtggccgccgagctgaggcactcctcacttccctgacagtggggcggctgggcagaggcgctcctcacttcccagacacttggactccgggcagagactctcctcatttcccagatggtggggctgccgggcagaggcgctcctcacttcccagacggttcagaggccgggcagaggcgctctggggagaggataatgttactcccaatatcgcagggggtgcacactccctgtgatattgttccgaatatccagagggggaaaggatgatatagctcccaaaatcgtggggagtgtacacccccctgtgatcttgtttgtaataccaagaagaaaagagaatgctattatttccaatatagcagggggagtacaaccccctgtgatattgttcgtaatatctagggggagagaaaattatattagtcttaatatctcaggggacgttcatccccctgtaatattgttggtaatattcagaatggagaagatgatattgttcttaaaatacaggaaaaaatatgataatattacttccaatatcgaagggggtgtacactctcctgtgatattgttcccaatatccagaatgaaagaggatgctattactcccaatatcccagggagtgtacacccctttgccatattgttcataatatccaggggaagacaggataacattactcccaatatcaccgggggtgtccacccactagtgatatttattgttcatcatatccagaaaaggagaggatgatattactcccaatattgcaggtggtgtacggtccctgtgatattctttgaaatatctagaaaaggagaggatgatatcactccgagtatcacagggggtgtacacccccctgtgatattgttcgtaatatccaggggagaaaaggatgatataattgccaatatttcaggggatgtgcacctccctgtgatattgtttgtaatatccaggggtggagaggatgatattactcaaaataacgtaaacatcctgtgtgtacatcccctgtgatattgtttataatatccaggggggtagaagatgacattacccccaatatcacagagtgtacacacccctgggatactgttcataatatccaggcgggaaagaatgaactacttccaatatcgcaggatatgtacacccccctgtgatatatttcctaatatttatgtgggtaaggatattacccccaatatcacagaaggtgtacatcctctttgtgatattattcctaacatccaggaaaggagagaatgatattactcccagtatcgcagggggtgtacaccacccctgtgatattgttgctaatatccagggggagaggataatattactcccaaaatcacaggggacgtacactcctcctgagatattgttcctaatattcatggggaaaagaatgctactactccaaatacagcagagggtgtacaccatccccgtgatattgttttttatatccaaagggtgaaaggctgatattactcccaatatcgcagggggtgtacaggccccccatgatatcattcttaatatccagggaggcaaagaatgatgttactcccaatattgcaggctgtatacaccccccgtgatattgttcctaatatccagagtaagagaggatgacattgctcccaatattgcaggggttgcacgcacgccctgtgataatattactcccaatatcaacagtgggtgtacactcctcctgtgatattgtttgttatatctaagaaagaagaggatgatattactgtcaatatcacagaaggtgtacagccccttgtgatgttgtttctaatatccagcggtgagaggatggtattactcgcaatattgtagggggtgtccaacggccctgtgatattgtttctcatattcaaaaaggaaaagaataatataactccaaatatcgcagggtgtgtacacttccctgtgatattgatcctaatatccaggaagagagaggatgatattaatcccaatatcacagggggtgtacatcgcttctgtgatattcttcctaatatccagggggggaggggatgctattactcttaaaatcgcagggaacttacactcccactatgatatttttcctaatatccaggaagggagaaaatgatattactcctaatatcacatatcacaatgggtgtacatctccccgtgatattgtttctaatatcaaggatgggagaaaattatattactctcaatatcgcagggggtgtgcacacctcctgtgatattgttcctagtatccagcggaggagatgatattactttaaatattgtagaaggtgtacaacccccctttgatattgttcctaatatccagggggaaaggagatgatattactcctaatatcgcaggggctgtacaaccctatgtgatattgtttcttctaatatccaggggtggagaagataatattactcctaaaatcgaaggggacatacactccccctgtgatatttttcctaatatccagaaggaaagaggatgatattactcctaatattacaagaaatgtatacctgtcctgtgatattgttcctaatatccagaggggtaaatgattatattactcccaatatcgcaggggtgtacaccttccctgagatattgtttctaatatgcagtggaggagaggatggtattactcccaacatcacaggagatgtaaactccccttgtgatattcttcctaatgttcaggacgaaggagggtaatattactcactgtattgcagcagggggtgtagagccccctgtgatattgtttttaatattcaaggttggagaaaataatattccttccaatatcgcatggggtgtacacccttctttttatatagtttctaatatctggggggagaggatgatattactcccaatatcgcagggggattacacccccactgtgatattgtttttaatatccagggtgggagaggataatattactccaaatatcccagggctatacaccctccgtgtgatattgtttctaatatccagaggaagagaagatgatattactcccaatgtcacagggtgtgtacaggccttctttgatattgttcttaatatccatgagggagaggatgatattactcccaatatcgcaaagactgtacaccctttctgtgatattgcttccaatatccagggagggagaggatattacactcaggatcacagggggtgtacaccccaacctgtgatattgtttctaatatctagggaaaatgagggtgatattactatcaatatcacaggaggtgtacactcccttatgatattgttcctaatatccaggagaatgacaggataatattactcccaatatcgcgggtggtgtctccccccactccgtgatattgttcctaatacccagagggggagagaatcatattactcccaatatcgcaggggatgtacacctacatccggcggagtagaagataatattactcacaatatcgcaagaagtgttcaccttccctgttatattgttgctaatatccagggagtgagaagatgatattactttcaatactgagcgtgtacactacccctgtgatattgtttctcatatccagtagaggagaaaatcatgttactcccaatattgcaggggtgaacacctcctttgtgatatttttcctaatatcaggaaagggagagtatgatattacccttaatattgacaggggtgtacacccccctttgatattgttccaatatccaggggggcagaggataatattattcccaatatcgcagagggtgtacaccccccgtgatattgttcctaatatccagagaaataaaaaatagtattatttccaatatcacagggcgtacattttccctgtaattttgttcctaatatctggggggtggggtggcaggataatattactctcaatattggagagggtgtacacccccctgtgatattgttcctaatattcagggtgggagagaatgatgttactcccaatatctcaggagtcgtatacacccccttgtgatattttttctaatatccaggaggcagaggatgatattgctcccaatatcgcagggggtatacacccgagctgtgatattgtttctaatatgcaatatgggggaaggatgattttactttcaatatcgcagggaatgtacactttccttgtgattttgttcctaatatccaggggtggagaagatgctattactatattactcctcatatcgcaggcggtgtacaactccctgtgatatggttcagaatatccagagtgaaaaaggagggtgacattactcccaatatcgggggggtgtacacccctttgtgatgtggttggtaatatccaggggggcagatgagggtgatatcactccccatatcgtggaaggcgtccacttttttgtgatgtggttctttatatcccgaggggagaaggtgatattactccccatatcgcgaagggcatacacccccctgtgatatagctcataatattccggagagtggaggaagatactatgccctatatcgcgggtggcctacaaccccctatggtttggcttataatatccaggggggagagggtaatattgctccccatattgtggagacgtacagccccctgtgatatggtttgtaatatctttggggggcgagggtgatattactccccatatcgcggggagcatacacccccgtgatctggttcatagtatctcaaaggaagaagttgatgtgtacaacttaagggaaaaagttgaagtgaagtgtacacacgccctgtgacgtggttcataatatccaggcgggggagaggagagtgatatttactccccatatcgcgggtgttgtaaactcccctgtgatatagttcataatatccaggggagagaggagggtgatattgctcctcatatcgcgaagggtgtacaaccccctgtgatatggttcataatatccagaagggtagaggacgatgatattactccacatatcttgggaggtgtgatatggttcgtaatatccagcgatgagagaatgatattactccccatatcgcaaaaggtgtgatagggtttgtaatatcctgagggggagagggtgatattaatccctatattgcagaaggactacaccctcccatgacatggtttgtaatatcccagggggtagagtgtgatattactttccatatcacagggggtgtgatatgattcgtaatattcgaagggggagagggtgacactactctccatatcacggggtgtgtgatatggttcttaatatcccaggggttagaggttgatattaccccctttttggggggtgtgtacaccccctgtgatatggttcgtaatatcccgggggagacagggtgacattattccccatatcgaggggatcgtacaccccctgtggtgtggttcataatatccctagggggagatggtgatattactccccatatcagggggcgtgcactcttctgtggtataattagtaatatccagggggcagaggtcgatattcgtttccatatcatgaagggagtacacttccctgtgatatggttcctaatatccaggggggagagggtgatattattccccatattgcggggggacatacaacccctgtgatatggttcataataaccagaaaagaagagggtgatattaatccccgtattgcagagggcatacaccccccctgtgatatggtttgtaatatctaggggaggaaaaggtgatattactttccatattgctgggtgcagacacccctttatgatatggttcataatatccaagttggagagggtgatattacttcccatatcatgggaggtatacccttccctgtgatatggttcgtaatatccagaaggggagagattgatattactccccatattgtggggggcgtacaccttcctgtgatacggtttgtaatatctaggggatatagtgggtgatattactcaccatatcacgggggttgtaacatggtttgtaatatccaggggaggagagggtaatgttactccccatatctcggggcatgtacaccctcctgtgacatggttcgtaatatccaggtcgggagagggtgatattactcctcatattgccgggggtgtgttatggttcataatatcctggggaaggaggctgctatcactctccacatcttgggggatgtacactctcctgtgatatggttcataatatccagggtgggtgagggtaatattactccccatatcgcgggaagtgtacatacccctgtaatattgtttgtaatagaagagagggtgatattactccccacatcgcgggtggtgcccacccccctgtgatatggtttggaatatccagggggatgaggagggtgatattactccccatatctcggtgggagtacatccctctttgatcaagttcataatatccaaaaggaaacaggagagtgatattactccccatatcgccgggggtgtacacgggagggggagtacacccccggcgatatggtctgtaatatccagggaaggagaggagggtgatattactcaccatatcgcaggtggtctacatttacctgtgaaacagtttgtaatatccagggggggaaatgagaatgattttttttttttgagtctcactgtgtcacccaggttggagtgcagtggcacgatcttggctcactgcaacccccgcctcctggactcaagcaattctcctctcccagcctcctgaatagctgggactacaggcgcaccccacaacgtctggctaatttttgtatttttattagagacggggtttcaccatattggccaggctgatctcgaactcctgaccctgtgatccatccgcctcggcctccaaaagtgctgagattacagatgtgagccaccacgcatggcccaaggagaacgatattactccccatatcccagggggtgtatatccccctgtgatatggttcagaatatccggaaggaaagacagggatattacttcccatatcgcaaggggtgtgacatggttcgtaatatcccatgggggagagggtaatattactcttcgtattgtgaagggcatacactcccctgtgatacagttcataatattccggggagtagaggaagatattatgctccatatcgcgggtggcataagccccctgtggtttggttcataatatccagggaggagagggtaatattactccccatattgtggggacgtacaccctcctgtgatatggtttgtaatatcccagaggggagagagtgatattactccccatattgcagggacatacacccccctgtgatatggttcaaaatgtcttttttttttgaaggactggttctttatttcaaaaagacacttgtcaatattcattatcaaaacagttgcactattgatttctctttctcccaatcggccccaagtagaccacatcaaaggagagtacatattaagccaataagctgtaggatgtacacctaacagacctcctagaaaccttaccagaaaatggggacagggtagggaaagaaactttaaaagatcaacaaactgccagcccacggactgcaggggctgtcacagccagatggggtggccagggtgccacaaacccaaagaagcaaagtttcaaaataatataaaatttaaaaagttttgtacataagctattcaagatttctccagcactgactgatacaaagcacaatgagatggcacttgtagagacagcagcttcaaactcagaaaagggtaatgagatgagtttcacatggctaaatcagtggcaaaaacacaatcttctttctttctttctttctttcaaggaggcaagaaaagcaattaagtgctcacctcaacataaggggaacatgatccattctgtaagcagttgggagggggtagagatggaacaaaattttggtctcagaggtcttgccatcttaatttggtcacttctaatgaaaaaaataaaaaatagaaataacattatccaaaggtatcttaaagctgaaaacttgaacagcacattttttgttgttgttgtttggctaactcctcctggaaccacctttctggcttagctagtactttgtacagagcaatgaggcttcccatagtggagtctccctgggctctgtttggctctcagcaaggcaggcctataccttttcctctcctccatggagagaggaatatgcattaaggtgaaaaatcaccttccaaaagtgagaaagggattcgatcgctgcttcagggctgtggtattatatggaatgttttacaaaaggttgctacaaaacaacaaaagaggtaattacaaaatgtgtacatcacaacatactttttaaagacattatgcattgtgctcacattcccttaaatgttgtttccaaaggtgctcagcctctagcccagctggaatctccgggaagaggcggacagtttggtgaaaaagacacagggaaggagcgggcggcggaaggagggggcggcgaaaggagaaagcagccttccagttaaagatcagccctcaattaaaggtcagcttcgggcaggctggcctcaggcggagtctggttcagagggaggagcagcagcagggtgagactgaggcgttctacatctcattcaggtcaagcagagtctggtccagcatcctttgtgtacagaggtgctcccctttggtgcatttcagtttatcttccaagtcatcaattgtcttttccagcttggctaccgatctctcagcaaactcagcatgggtctccgcctcctttattttatcagtaagaatcttgatctcttcctcatatttgtcttctttttgagagtacttttcttcagcagcactcagacacttcaggttctggtccatcagtctaatctgctcatccatctctcggcaaagggattctgccagctcagctcgttcctctgtgcgttccaagtctccttcaatgatcaccaacttacgagccacctcttcatacttcctatctgcctcttctgcaatgtgcttagcttctctgagttggatttcctggagttccatcttttcttcatcttttaaggcccggttttcaataaccttcttacctctctcactctcatcagcagctttttccgcttcttccagcttttgcagggcagtagccaggtgctcctgagcacggtccagctcctcttcaaccagctggatcccacgttcaaggaggccacctcagcctcagcctgttcccgggcccacctttctccctcaacttctcgctggaggcgctcagctcgctcctctgcatcatctgcctgctgctgcagaacctggatcttgcgcttcaccgcctcgatggtggtgatcccagccatggtgcccacccagctactgctagagctccggttcctgcctcctccgatcggcgttgcagcctcctctcacccttacttccgcctcggttcaaaatatcttaagggaaggagttgatattactccccacatcacgggaagtttacatcccctggtgatatggtttgtaatatcccagggtggatagggtgatattactctccatatcgcgaaggagtactcccccctgtgatatggttcataatatccttggggggagagtgtgatattactccccatatcgcgagggccatatactcctttgtgacatggttcgaaatatcccggtgggggagggggtagagggtaatattactccccatacagcgaagagcatacgcccttctgtggcaaggttagtaatacttcagggaaaagagtgcaatattacttttcatattgcagggaacatacactcccctgtgacatggttcgtaatatcccgggggctgagagggtgatatttctccccatatcaccgggggcctacacctgggtgtgatatggctcataatatacagggagggagagggtgatattactccacataccgagtgaggggttacacaccctcgtgacatgttcgaaataccccaaggaggagacaatgatattactttccctgtcgcgggggctacaccctcccagtgatatggttcacaatatcccggggtggagagggtgatattactccctatatcaccggggggtgtacacttccctgggaaatggtttacagtatccccggggggagagggtactattactccccatatcacgttacatatcagggtacacccccacgtgatatggtttgtaacatcccaggaggaagaaaatgatattactccccatatcgcggtggcatacacccctccccgttaaatggttcataatatcttggggtggagagggtgatattactccccatatcacgtggggcatacaccccactatgatatggttcataatatcccggaggggagagggagatattactctccatgtcgcggggggcatatacacccctgtgatatggtttgtgatatcccgggggcggagagggagatattactctccatatcgtggggtcgtacacttttctgtgatatgattcgtaatatccagacggggagagggtgatattacttcccatattgcgggggcgtacacccctctgtgatatggttcataatatcccgaagaaaagagggtgatattactcctcatatcgcggggaacacacaccaccctgtgatatggtttgtaatattcagcgggggagagagtaatattactccctgtatctcggatggcgtacactcccctgtgatatggttcataatatccagaagaaaagagggtgatattactccccatattccagggaatgtacaccaccctttgaatatggttcgtaatatccaggaggggagagggtaatattgctcccaatatcgaaggaggtgttatacggttagtaatatccagagaaggagagggtgacattactccccacatcgtggtgggtgtgcacccacctgtgatatggttcataatattcaggttaagagaggtgatattgctttccatatcgccaagggtgtacactcccgtgaaatacagttcgtaatatccaaaaggggagagggtgatattactcccatatcgtggggggtgtacacccctctgtgatatggttcataatatccagggtggaataaggtggtattactccctgtatctcggggcatgtacatcgcctgtgatatgattcataatatccagaagaagagagggtgatattaatctccatattgctgggggtgtacaaccccctgttgtatggtttgttacactgagttggggagagggttacattactctcaatatcgagtggggcatacacacttatgtgatatggttcataatatcccagggaggagagggtgatattactccccatatcgcgggaggcatacaccccaatgtgatatggtttgtaatatctacatttttttttttgagacgaagtctcgctcttgtcccccaggctggagtatgatggccggatctcggctcactgcaacctcagcctcccgggttcaagcgattctcctgccttggtcccccaagaagttgggattacaggcgcacaccaccacgcccggctactttttgtatttttagtagagaaggggtttcaccatgttggccaggctggtctagaactcctgacctcagatgatccacctgcctcggcctcccaaagtgctgggattacaggcgtgagccactgcacctggcctggtttgtaatatctatgaagggggaaggtgatattactttccatatcacgggaggcgtacaccacgatgtgatatggtttgtaatatccagggggtatactgggtgatattactccccatatcgcggggagtgtatacccttttgtgatatggttcctaatattaagctgaggagaaggtaatattactccccatatcgcaggggtttttatatggttcataatattcaggaagagagagggtgacattactctccatatcacggggtgtgtactcccccatgtgatatggtttgtaatatccagggaaggagaggttaatattactccccatatcgcagggggtgtacacctctctgtggtttgtaatatccaaagggaagaggatgatattatcttcaatatcttggggggatacagtccccagtgatattgttcataatatccagagggggaggggatgatattactcccaatattgcaggtggtgtacaaccccctgtgatattctttataatatagagggggatgatgatattactcccaatatagtaaacaacctgtgtgtacaccccctgtgatattgtttataatatccaagggtggaaaggatgatattactcctcatatcgcagggggtgtatacccctctgtgacattgttcctaatattcaggggaggagaagatgatactactcctcatatcacaggggatgtacacccccctgtgatacttttggtaatatccaggggaggagaaaattatattattccccatgtcacagagggtgtacaccccgctgtgatagtgttcataatatccaggtgaaaagaggatgatattactccgaatatctcaggaagtgtacacccttctgtgatattgttcataatatccaaaggtggagaggaggatactactccccatatcgcagtgggtgtacacccccctgtgatatggttcataatatccaatgtaggagaggatgatattactttccatatcgcggagagtgtacatccccctgttatattgtttgtaatattcagggagaaagaggatactactactccccatatcacacggggtgtatattcccctgtgatatggttcctgatatccaagagatattataatcctctcttggattatgctacctctcatatcgcatggggtgtacacacactttgtgatatcgtttgtcatatccaaggagggagaggattatattaatcccaagatcacggggggtgtacaccctcctgtgatattgtttgtaatattaaggggggagaggataatattactcccaatataattaacaccctgtgtgtactcctccttgtaatattgttcataatatccaatgggggagacgatgatattactttcaatatcgcagaggatgtacatccctttgtaacaatgtttgtaatataaaaggcaagagaggatgatactacttccaaaattgcaggacatgtacaccccccggtgatattgttcctaatatccagtggggaagaggatgatagtagtcccaatatcgcaaagggtgtacacaccccctgggatattgttcctaatataaaaggaggagaggatgctattattcccaatatcacagaaggtgtaaaatcccctgtgatattgttcgtaatattcaggaggggagaggattatattactcccaatatcacagggtgtgtacacagggaggggcaagggccagaagcgggcgggaatccccatgtttgggcggacccagtttctaatggccagcatttgccaatcaaagcttaccagagaactctaaaagccagggctttcctgctagacaagactcatttctggaactgctttaaaaagaaacaaaacttcccaaggaccccttttcctctctgtctgcctaaaataatgttttaaaaactcctaaagcagctgaattcagcccccttcctgggggaatgtatagacggaactcccacctttcccggcatcccaaggccagagtatgtgaaactcctgggtctctatgtgtgtctgagcggctgctctgccaacactccacacagccctgtgtcctggacccaaggcccttatgacctgagctcaagaggggatctcctgatccatgggttgcaaagatccatgggagaagcatggtttctggggcggggtcacacgctcagtcactgtttccctcggatgccggagatggttcctttggctctctgccaatacagggtgaatcatcatccatccctcttttctttgttctcccgggtcaagttgtttgcctagtcagtcccaatgtgagaacctgaatatttcagttgacgcgctgacttcaaaatccccgggcttcgggaggcggagcttgcagtgagccgagatcccgccactgcactccagcctgggcgacagagcgagactccgtctcaaaaaaaaaaaaaaaaaaaaaaaaaaaaaagtccccgggcttttcttttcactcagtggaaggcagctgcttctaattggccatcttggcccgcccccaccacgtgaccttctgtaaaatgcctccactctccaggaacgctctcattatataactttgcctgaaaccaacagcacgctcattgcacatatcatgggctcatttatttcacttataaagaacctggccaaggaagagatagtgcctaaagtggccagtattctgaccgatatgttagaaaaatggtgtgccgaccaattcatgacatgtgtcccaaaactagcaacggaaattgtattcgccgtgttgaggtctctaatccagatgatgctcatctatgtactggaaaaggcagagtcctttcctgacaagctgctgaaactcttcagaaacatctcatatttcctgaagaagatgatgtctggacaagcagcacaggtcgttcagatttaactttctattcatatatccagcacgatattcgcacaattgtcacgaaaccttaccagttgatgagtcctgcacatttcctttaatttcaggaggaagagggtaatccggatgagttttctgacctactctgctgctgtgattaaacaaccaccaggaaattttgacgacactgttctcctgagctcctccctttcctccgggaacaaaacaattgaatttacaaaaataaagtgttatttgactggagtgaggtctcatgtctgcttatgcggtggctcgctgctcagaacagggtgagtctctgggttgtgtgctgaggaggggaggctctcaatctggagaaaacccactgcaggggacacctccatggggtctgagggactgaggatgaggagccggactgggtctagggaaggaggaggtttcagagggtgaaattctggcactaaagcctgggggtgtttgggaacttcctccttccgaagaagtttcagggagggataaagacaaaccctgggctccttgaggggcccttactaatttgagaggactctatcgggaaggagagtgacaatggcctccttgaggactgaggcccctgaataaatgaggcccagatacagtccatgggggatgagaccttcaagggtcacattttggttgggacagaggaaaagtgcagctctgcagccgcagaggaaaacccggcagtgtgaaagcgaccttggaggggccctgtgcgctctgaatgcgtctgagcccccatcccctgtccccgcctctctttctggattcttccagctcggctgtctccgccatcttctgagcgctccaccctgacttattcaagtttcccttctgccttccaagtactccaaaatctttcagatctgtgtccctacccctgtttttagcatgtgttggggctccaggtccctgaaggtttctggcctgaaatccacctccccagcggagtggactgcgttctagagactccacactccgcgaggttcccaggcccctgagggacaaccgagtggcctgcgcacttcagggctccacactcggcaaggtctttcaagcccttggggtccccttcttagttttttccacctttctgggctgcagtcactccataaatgctgggatctgatccccacccccactctcgtttcctcaattctgcgggctacacgctctggcaaggtcctccgggccctggatcccctccctctccctatgcccacgctcctagtcagcccttctggggtccactattttcaggaactaaccgttctcatggagccttgctaaccggaaagctgtgtggaagaaaggctttgaggatagaggtggagatttggctcttccatagtgccactcacccaccccaccatgctgccactgccagacccggacccctgtttcagaacaagtgaccagattcgctcctggacagccctggacactggccttttctctgaaaactactcaccctttctctagtccccacttcatgccagcctcataccctcttccttcccccacgctggcttccgggatcctcctctgctcagacaacctcttctgtgtcccacccccgtttttagaatgctttggggcaccaggttgggggaaggtttctggcctgatatccatctctttccaaactcccttcttcccttgaaaggcttcttgccttcagccccacttctggctccgaggtttcaggacaccctcctcttcatcctcattcttttgaccaccagctttttaggaattcgaacgtccctctcatcttcgtgaatcctgtccaggcatttgttgaccccttcatctgatacccctgacctcacattgccaaaagtctacccctacccagtacactggaattagacaaaatcccaggagttttacctcaactctgagtgtgcccacaggagctctccctgaagccacgtccttttaagcagggtctagggttcctcccttgtcttaatgaactctttgtcacacggaggacgttatggagcccttatgatctttcactgcctttctgcccagcgttttgtctttccatggacatttataatattttccatggacattttgttctctcaatgtccacccctaatttccaacatcccaaagattctcatgtgtttcctgaaagccatttacaggaatggctgtgcccagacccccttccccaggatcctccttcacacctggtaggtgcctctcctagagagatttgcactcagttgtcgtgcagtcacatggcccagatggttgttaatcacccccttcctggcaacagctagcagccagggaatcactggcacagaaacctcagggtgaccaagatgaggccacctctgtgctgaaggctgtgctccagagcctgcttgggatcaggcttaagcaggtcttcagccagacctgatgttacctggtttccttgagctgccctgcctgagctatcgggagcactccctcaatgcacatcttgattccctatctcatgctctgcttctagaaaccatgagctatcaattgctactggcaatggtcctgggaagtcaaccctaagtatggattctggggttggatgactccccacaggacttcagtgagcaacaatcactgctggcagttggaggacagagtcgctagggcatgtgaccactgtgaaaccaccgatgtttcacctggggtaattttggatgaactacggtagaagcactgaaggtacattgcttttggtttggaagattgtaggtaaataatagcgatatgaatgtggaattggatggctgcaaacgagtgccattgatgcattgaaagaggaaaagtcaggctgtcacctgtcactcagcaatttaaagtgtgagagttgggactagatgtggtggctcacatctataatccagagattcgggggaagcttgaagaggtaggatcttttgagtccaggagttccagaccagcctggacaccagagcaagacctcatctctacaacaaaattttcttaaaaattagatgggcttggtggcacgcacctgtacttgtagatctagctaatggggagcatgagataaaaaaatcacctgagtcagggacttaggggttacaatgaggtatgattgtgccagtgcacacactcccacctggccaacagagtgagattctgcttccaaaaaaataagaaataaatcaggtttgagagttggaaagcatcatcttctcctagagccaaaggacatgtacaactgagacccaggaacaaagcttcatcacaaagagaccatcatcagtggagccgggagatgcattccccctcaccctgccttgaggaggcagtggagtcatctgtctgggatcctttctgacccagccctatttgtttgtctctttggcttctttggatttgtatattttagctgttataacactgtaaaacaaacagagtgatttttttgagttgtgtgaatgatgctagctccatagtcaccctgagagtgatgggaacttttgaatttgtggcaagttggagggtagtgtaagtgacctgagattgccaaattggggctagcactggatgtgaggttaggctagtggaaaaatatgcccagaaccagaggagtgtgggctcactgcaggtggttaggctcagatccaaattgtacagatggatagctttggggtaaagaataacatagttgagaagtgcatgtgttagtctgttcatgcactgctataaagaattacctgagactgggtaattatttataaaactcaggtttaattgggtcatggttccacaggctgtacaaaaagtatgatgctggccatcagctcaacttctggggaggccccagaatagttagagtcatggcaaaaagtacaagggaagcaggctcatcttccacggccagagctggagcaagtggtaggagaggtgatacacactttcaaacaagtaggtcttttgagaactccatcaccggacagcacctatgggatggtgctaaattattcatgaaatatccgcctccataatccactcaactgtcaccagcgcagccagccccacctccaacagtggggattacaattccatatgaggtgtgggtggggacacagctccaacctcaatcagtgggcatcctggattgggtctactatagaaggagaaccaggagctgactatgatcttgaaccctacccatgatggccgggcggggtgactcatgcctgtaaccccagcactttgggaggctgaggtgggtggatcgcctgaagtcaggagttagagaccagcctggccaacatggtgaaaacctgtctctactaaaaatacaaaaaattagaccggcgttgtgctggatgcctgtaatcacaccactacgctccagcatgggaaaaaataccaaaacttcgtctcaaaaaaaaaaaaaaaaaaaaaaaaaaaaagactgcccatgaccactgcaccagtgagagggacaccagcatcactgagatgcaagggctggacattcttcataggtcagagctcaaagcaggggacactgatacagagatgggctccatccatagcaccaaagtggtgagaggatgtgggaatggcagaggccagcactttgccatcaatgcaagggggtataaggaggtgacaccagtgccagagtacatcacggggggactgccctacaatatctaggacttacctcttagagcgtgtttcattagcgacaacagatataaatggcagacaggtgtgtccctgcattaacaggaaatagaaatcatcaagaggaacagaaggcagatgtcagcagccccttagaaagtcatcatccttcatacagttaaaatctgagacagttctcacacgagaaggcctaactcaaaaagaggctgggttctcatgaggcaggtttatgcaaaaccaaggaaggtgtacaagtttggaattctccagtttcccttggaaaagacctacagtcatttgcttaggtaactgagcactgaacaaaggtgagtattgttgtcttttagaagctcttggccaagaaggccttgttggcataaaacccatggtttggaaacatcaccatgacccctgttagagtaatggcctaagggtgggggtcaggaaattgatgtattccttgccaacttctgcctctaagtgagtgaactctgtttgtgaacctctctcctctgtggttatgttcctaggctctcatgtataatcaggagtcatagacttagaaacaggaaaaatacttacagtgtttttgtggcctgtgagctatgacttataattttaggaaaaaaacaattgcaaatggaaagcctaagtctatcaatgctcatccaagacaacataatcaataaaaaccaatatcaaatctcaaggcaaattatttcctgtatatagatggcagagatgagcaccaccatcaaaaactcaaggaccagtgctgtgggtccagtcatctgtttcatggaattcaccagtctggtatcttcaaaatccagaaggatgatggcagatggcaggaaagtaatgcaaacgtcatcaggtgtgaccccactgtagcagctgtgatggatgttttctctcaccatagcaataaataacacaacctcggtcacactgtatgcattgttggtctgcaaaatccatgttttgcaaaactcttcaggaaggtggatctgtaatattggcattgacatgagaacaacagcagtatttattcacaatctcaagctctctgtcttcccgtctctctcattagccatccaagtagtcctgaggaaccaagcccatcagaacattctgcaacataatacacagctccattctccattcaaattttgttgttgttgttgttgttgatgagacaacatcttactccatcagccaggctgacgtacagtggggctatctgggctgactgtagtcttgagcttccaggctcaaggcatcctctcacctcagcctcctaagtggcttgaactacagacacacagcgacatgctgggctagtttttgtatattttgtagagacgtgctctcaccatgttattcaggctggactcaaactcctgagcgtaagtgatccaagcaccttggcctcaaagtgctgagattacaagcctgagccactgcacccagcccaatctccattctactgataacaatgtcattaccaggtctgatggacaggaaatggtaaggtttctgaaaacctaaggatcacacagcgagttccaaaggctgaaagtgcatacctgtcgacactgataccaatgacatccaatggtgagaatgacattccttgtagtcctagctctgctcataacaaatctatactgaagtgtaagagtttgatggtcatggggattttccatgtctctgcctttcagcgatgtgccatatctgtgaagtgttcagaaatgcaacagcctgaggcatgctgggcatatcctctaataaaaaggaaaatgccattttatggtcctgtatttctacaagttggaacacatgggcctgtgatccagatgggggaaatgggaatattcccactcattcaccttcatccacgaagcccatttgaaagctttgggcttcccatccttgtagattttagtgttgtgggctgggtgcagtggctttcacctgtactgccaacactttgggaggcctagacaggtgaatccactgaggccaaaagttcgagaccagcctggccaagatggtgaaaccccgtccctactaaaaatacaaaaattagcaaggtattggggccagcacctgtaatcccagctgctcgggaggctgaggctggagaatcgcttgaacccaaaaggcagagactgcagtgacccgatcctgcctttgcactccacctgggcaagcagaacaaaacttctgtcttgaaaaaaaaaacaaaaaacgaacaaaaaagatgttagagttctgggtttagaggtctataccccagaaagagaatggtttcaacaagggacaaagaagttgctttaaacgttgacttgccatttcttttcagtgtgtttgttctcttgcgtcaagagaccaccagaaaagtggtgcaattactctcctgtcaagaatcattgactatcatctgcaagagggtcagatcctggtatataattagggcagaaatacttagtctgagaagggtatgacatccagaggccctattaatgatgtccttttctccatgcctgactctgaccccatgtgctggactgcccctgtgtggatggcctcatggcctgctcggactctgaggtcccaccccaagtggcacctccatggagggctctactcttgtatgggctctgacactcacactgagacactctcccatggacacctcttcacccacttggggtctgaaactgggctactccatccctccctaacctggaacagagagctttcactgctattacacaagtcatagaggctaactcctcatttttccaagctaattattgaaacattagtcctgggttgataagacaagataagttaacttttcataaatttgcttatcaagttttgaataaattcaaataaattcaccttccccacacaccttagttgtcgacatcacacgcgcacccatactcacagggtgagcacgaaggcttcactgtcagtggagaaagtggcaaaacccttctgtgcctcatcctggtctagacctggccctcatcctttcccactcttcccctcactcccttggattcatccacactggcctcctgcctgctgctccacctccctgcgaagctcacccctgcctcagggcctttgcacgtgcagtggcttcaagccatatcctcttcacccagatctcccagatctcctgaatgatcttcttttatcattcaggtctcagcttgcatgtaatcttctcagtgaggattacccaaaccacatagttcattcattcattcaaatattcattcaatggcatattgacaaagcagctacttcatgccaggccttgggccaggtgttatggatatggcaacaaacaaaacaagagttttctgctctcaaatttttacccacttaaaggagatatcatacatcatctgtaaataaatacatcatctgtaaataatgatgtaaataaatacatcatctgtaaatctgtaaataatgatgtaaataaatacatcatctgtaaataaataaagtataataaaagaaaatagtaggtttttttggttggaggtgaccgtgaagtttgcaaataccatcttacaacacattattttattttatttcatttcatttttaattttattattattatactttaagttttagggtacatgtgcacaacgtgcagatttgttacatatgtatacatgtgtgaagttggtgtgctgcacccattaactcgtcatttagcattaggtatatctcctaatgctatccttcccccctcccccaccccacaacagtccccggtgtgtgatgttccccttcctgtgtccatgtgttctcattgttcagttcccccctatgagtgagaacatgcggtatttggttttttgtccttgtgatagtttgctgagaatgatggtttccagcttcatccatgtccctacaaaggacacgaactcatcattttttatggctgcatagtattccatggtgtatatgtgccacattttcttcatccagtctatcattgttggatatttgggttggttccaagtctttgctattgtgaagagtgccgcaataaacatacgtgtgcgtgtgtctttatagcagcatgatttataatcctttgggtatatacccagtaatgggatggctgggtcaaatggtatttctagctctagatcactgaggaatcgccacactgacttccacagtggttgaactagtttacagtcccaccaacagtgtaaaagtgttcctatttctccacatcctctccagcacctgttgtttcctgactttttaatgatcgccattctaactggtgtgagatggtatctcactgtggctttgatttgcatttctctgatggccagtgatgatgagcatttcttcatgtgttttttggctgcataaatgtcttcttttgagaaatgtctgttcatatccttcacccactttttgatggggttgtttgtttttttcttgtaaatttgtttgagttcattgtagattctggatattagccctttgtcagatgagtaggttgtgaaaattttctcccattctgcaggttacctgttcactctgatggtagtttcttttgctgtgcagaagctctttagtttaattagatcccatttgtcaattttggcttttgttgccattgcttttggtgttttagacatgaagtccttgcccgtgcctatgacctgaatggaaatgcctgggttttcttctagggtttttatggtttgaggtctaacatgtaagtctttaatccatcttgaattaatttttgtataaggtgtaaggaagggatccagtttcacctttctacatatggctagcctgttttcccagaaccatttattaaatagggaatcctttccccacttcttgtttttgtcaggtgtgtcaaagatcagatagttgtagatatgtgacattatttctgaggactctgttctgttgcattggtctatatctctgttttggtaccagtaccatgctgttttggttactgtagccttgtagtatagtttgaagtcaggtagcatgatgcctccagctttgctcttttggcttaggattgactttgcaatgcggggtcttttttggttccatgtgaactttaaagtagttttttccaattctgtgaagaaagtcattggtagcttgatggggatggcattgaatctataaattaccttgggcagtatggccattttcacgatattgattcttcctacccatgagcatggaatgttcttccatttgtttgtatcctcttttatttcattgagcagtggttttagttctccttgaagaggtccttcacatcccttgtaagttgggttcctaggtattttattccctttgaagcaattgtgaatgggagttcactcatgatttggctctctgtttgtctgttattggtgtataagaatgcttgtgatttttgtacattgattttgtatcctgagactttgctgaagttgcttatcagcttaaggagattttgggctgagacaatgggttttctagatatacaatcatgtcgtctgcaaacagggacaatttgacttcctcttttcctaattgaataccctttatttccttctcctgcctaattgccctggccagaacttccaacactatgttgaataggagtggtgagagagggcatccctgtcttgtgccagttttcaaagggaatgcttccagtttttgcccattcagtatgatattggctgtgggtttgtcatagatagctcttattattttgagatatgtcccatcaatacctaattattgagagttttcagcatgaagggttgttgaattttgtcaaaggccttttctgcatctattgagataatcatgtggtttttgtctttgggtctgtttatatgctggattacatttattgatttgcatatattgaaccagccttgcatcccagggatgaagcccacttgatcatggtggataagctttttgatgtgctgctggattcggtttgccagtattttactgaggacttttgcatcaatgttcatcaaggatattggtctaaaattctcttttttggttgtgtctctgcctggctttggtatcaggatgatgctggcctcataaaatgagttagggaggattccctctttttctattgattggaatagtttcaggaggaatggtaccagttcctccttgtacctctggtagaattgggctgtgaatccatctggtcctggactgtttttggttggtaagctattgattattgccacaatttcagatcctgttattgctctattcagagattcaacttcttcctggtttagtcttgggaaggtgtatgtgtccaggaatttatccatttcttctagattttctagtttatttgcgtagaggtgtttgtagtattctctgatggtagtttgtatttctgtgggatcagtggtgatatcacctttatcattttttattgcatctatttgattcttctctctttttttctttattagtcttgctaccggtctatcaattttgttgatccttttaaaaaaccagctcctggattcattaattttttgaagggttttttgtgtctctatttccttcagttctgctctgattttagttatttcttgccttctgctagcttttgaatgtgtttgctcttgcttttctagttcttttaattgtgatgttagggtgtcaattttggatctttcctgctttctcttgtgggcatttagtgttataaatttccctctacacactgctttgaatgtgtcccagagattgtggtatgttgtgtcttttttctcgttggtttcaaagaacatctttatttctgccttcattttgttatgtacccagtagtcattcaggagcaggttgttcagtttccatgtagttgagcggttttgagtgagtttcttaatcctgagttctagtttgattgcactgtggtctgagagacagtttgttataatttctgttcttttacatttgctgaggagagctttacttccaagtatgtggtcaattttggaataggtgtggtgtgatgctgaaaaaaatgtatattctgttgatttggggtggagagttctgtagatgtctattaggtccgcttggtgcagagctgagttcaaatcctgggtatccttgttaactttctgtctcattgatctgtctaatgttgacagtggggtgttaaagtctcccattattattgtgtgggagtctaagtctctttgtaggtcactcaggacttgctttatgaatctgggtgctcctgtattgggtgcatatatatttaggatagttagctcttcttgttgaattgatccctttaccattatgtaatggccttttttgtctcttacgatatttgttggtttaaagcctgttttatcagagactaggattgcaacacctgcctttttttgttttccattttcttggtagatcttcctccatccctttattttgagcttatgtgtgtctctgcacgtgagatgggtttcctgaatacagcacactgatgggtcttgactctttatccaatttgccagtctgtgtcttttaattggagcatttagcccatttacatttaaggttaatattgttatgtgtgaatttgatcctgtcgttatgatgttagctggttattttgctcattggttgatgcggtttcttcctagccttgatggtctttacaatttggcatgtttttgcagtggctggtactgactgttcctttccatgtttagcgcttccttcaggagctcttttagggcaggtctggtggtgacaaaatccctcagcatttgcttgtctgtaaaggattttatttctccttcacttatgaagcttagtttggctggatatgaaattctgggttgaaaattcttttctttaagaatgttgaatattggcccccactgtcttctggcttctagagtttctgccaagagatcagccgttagtctgatgggcttccctttgtgggtaacccgacctttctctctggctgcccttaacattttttccttcatttcaactttggtgaatctgacaattatgtgtcttggagttgctcttcttgaggagtatctttgtggcattctctgtatttcctgaatttgaatgttggcctgccttgctaggttgcagaagttctcctgggtaatatcctgaagagtgttttccagcttggttccattctccccatcactttcaggtacactaatcaaacgtagatttaatcttttcacatagttccatatttcttggaggctttgtttgtttctttttactctctttcctctaaacttctcttctcacttcatttcattaatttgatcttcattcacttatatactttcttccacttcatcaaatcggctactgaaggtattgcatgcatcatgtagttctcatgccatggttttcagctctatcaggtcatttaaggtcttctgtacattgttttctctacttagccattcgtctaatcttttttcaaggtttttagcttccttgtgatgggtttgaacatcccctttagctcagagatgtttgttattactgaccttctgaagcctgcttctgtcaacttgtcaaagtcattctccatccagctttgttccattgctggtgaggagctgcgatcctttggaggagaagaggtgctctggtttatagaattttcagcttttctgctctggtttctccccatctttgtggttttatctacctttggtctttgataatggtgacctagagatggggttttggtgtggatgtcctttttgttgatgttgatgctgttcctttctgtttgttagttttccttcgaacagtcaggttcctcagctgcaggtctgttggagtttgccggaggtccactccagaccctgtttgcctgggtatcaccagcggaggctgcagaatagcaaatattgcacaacagcaaatattgctgcctgatccttcctctggaagcttcgtctcaaaggggtgcctggctgtatgaggtgtcagttggcccctactgggaggtgtctcccagttaggctagatgggggttagggacccacttgagaaggcagcctgtccattcacagagctcaaacactatgctaggagagccactgctctcttcagtgctgtcagatggggatgtttaagtctgcagaaatttctgctgccttttattcagctatgccctgcccctacagatggagtctacagaggcaggcaggcctcattgagctgcggtgggctcctcccagttcgagcttccagaccactttgtttacctactgaagcctcagaaatggtgaacacccctcccccacccagtctgccgccttgcagttccatctcagactgctgtgctagcagtgagcgaggctccatgggcgtgggacccactgagccaggcacaggatataatctcctggtgtgccatttgctaagaccattggaaaagcacagtattaaggtgggagtgtcccaattttcccagtacagtctgtcacgggttccctcatctaggaaaggtaaatcccctaaccccttgtgcttcccggtgacgcaatgccccaccctgcttcagctagccctccatgggctgcatccactgtccaaccagcccaatgagatgaacaaggtacctcagttggaaatgcagaaatcacccatcttctgtgtggatcaggctgggagctgcagaccggagttgctcctattcggccatcttggaatggcaatctatgtttgctttttacatttgaaaaaactggtgtcacgtacctaggtattaatcattgtggtatcctcttgccgatttacctctttatcattaactagtgaccctccttgtcttttgttgttacagtctgtgattttagtctattttatctaatatgagaatagctactctggcacttttttggtttccagcttcatgaaatatccttttccatttccctgttttcatttccctttcggtgtctctatagatgaagttgatttctttaaggcaccataagttgggtcttatttctttatccatttgaccatttagagaatttagaacactgtcagtgttattattcataagtaaaaacttaagagtgggtgtagtggtgtacatctgtatttcctgcactttgagagactgaggcgagctgatctcctggggtcaggagtttgagaccggcctggtcaacatgatgaaaccctgtctctactaaaaatacaaaaattagccaagcatgctggcatgtgcctgtaatccaatttacttgggaggctgaggcaggagaagcttgaacctgggagacaaatgttgcagtgagctgagatcacacagagaagtcatctccactctcctcatcagaacctcttgttcacagcatttgtgagcacaaatcaatgatggttattctttcctactaattagggatattttattacacagcaatagcctccagcaaagggaaccatcatacatgattcctacaagttgacagggctggaattatcactgaaaaactaaggtggctatacttgattcccaatgtccaatttttcatgaatagagaaatttatcctttttccccccagccagaaaccaagttttgctcttacgcccaggctggaatcaagtggcacaatctcagctcactgcaacctctgccccccagcttcaagaaattcaccttttgaacaaggagatattaaggatacactatgtgtatgctaccggtggttgcaggagactcagaaaagagagaaacagtcactggcctcgtgcaactgatattctcgggaggagagaaaggcaatcaagaaagaaacatgctgtatttcagacagctgtaagtcctccacaagaaaagaaagcaggtgaggaacataggaaatgtgtcaaccataaggttcccgctaattctataagttggtcagggatatcctccaagaataagcagcatctgagcaatcacctgaagggaggaaggaaggaagactgtgagtggtggcttacacctgtaatcccagcactttgggaggccaaggagggcagattgcctgagctcaggagttcacgaccactcagagcaacctgttgatacccaatctctactaaaaacacacaaaaaaattacccgggtgtggtggcacgcacctgtagtcccagcttccatgcccagctgatttctctctctccatatatatatatatatacacatatattgtttttgcagagatagggtctcactgtgtcacccagtcatcaagcaattctcttatactgttttggaaaagcatgggaattacaggtgtgaaataccctgctggtcctgaaaaatgtgatatttgggattctctgcctggcttgttttacccaaaataatgacctccagttccttccaggttgctgcaaaagacatgattttcactgttttataactgaatagtattcctgtatgtatacataccacattttctttatttattcttctgttgattgacatgtagggtgattccatgtctttgctactgtaaataatgctgcagcaaatatttgtgtgcattttgatctattcctttgagtaggtacccagtactgcaactgcaggactgagtagttgttatattttttgttctttcagaaatctccatagtgtttgccataaaatctgcactaatttacattcccaacaacaatgcataagatttccccttttctccacattctcactaacatttgttatgtttttgtctttttcataatacccattctgactggagtaagatatctcattgtggtggttgttgatatttttgagacggggtctcactctgttgccagactggagtgcagtggtgtgatcgtggcttgctgcaacctccacctcccgggttcaagcaattctcctgcctcagcctcccgagtagctgggactacaggcgcgtgccaacaggcctggctcattttttgtatttttagtaaagacagggtttcaccatgttggccaggatgatcacagtctcttgagctcatcatacacctgcctcagcctcccaaagtgttggaattacagtcatgaggcagcgcacccaacctcaatgtggttttaatgaccatttctctgacgattcatggtgtggagaatttctttgaaataccttttggccatttatatgtgctcttttaaaaactgactcctgtccaggtgcggttgagcatgcctgtaaccccagaacttcgggaggctgaggccaatggatcacttgaggcaaagaggcagaaatcagcctggccaacaaggcaaaaccccatctttactaaaaatacaaaaaatcagccacgggctgtgactcgtgcctgtggtgcaagttactcaggaggttaaggcacaggaattgcttgaacccggtaggcacaggtcacagtgagccaagatcatggcactgcactacagcatgggtaatagagaaagacctgtctcataaaaacaaatgaataaataaataagataaaaaataaaaaagtctctttatgtcctttgccgactttttaatgggattctttggagttttctgttgtagttgagatctttgtttactctcggtattagtcttttgtcaaaggaaaagtttacaaataatttcttccgttctgcagtttgtctgctcactctgttgagaggattatttctttggctgtgcagcagctttttgtttcagtaaagcttttgaatttatataattaaaattttcagtttggtttaaatttgcactggtcgatttttggttttgttgcctgtacttttgaagtcatactcttgaactctttactagacaataaccagaagagttttctctagttttcttctcacatttttattatttcagtacatatatttaagtctataattcatcttcaattgatttttgtagaaatagtgagaaataggagtccaggtttattcttctgcaaatgacaattcaattgttccagcaccaattattgaaaagggtgtgctttcctcaacgtatattcttatcagctttgtcaaagatcagttggctataaatgtgtggctttctttctgggctctctagtctgttacatcaatctgtgtgtctatctgtatactactaccatgctgtattggtgatgatggctttgtaatataatttgaagtcaagaaatgtgatgctcccagctttgtttatttgcttcagaaaggctgagtcaacagctgcagagatgaagctgcccctcctcgcagggctccttcccggaaaaagatcatggctcccactgaccatataaccatggctggaactcctgaaattcccaaagggaggccctacccagtgaggggggatgaatgaaggtcctacttaaggaatctgtctggccacaatcaggcacagcagctgtgctgccttgtgggggaccagaccacctggattccctggagcctgcaggctagaatgtctgagtccatggaaacacagaaatggaggccgccctcacctccccagaaaactgtagtctcaggcagtctccagccgattgccactggttggctgctattccaagccagtgggtcttaacttgagaggtgctgtggaagtggggcccacggaatgaggctgcttggctccctggattcagccccttttctaagggaatgtacagatggaactcccgccttgcccagctttccaagtatataaaactcctgagtctctgtgagtgtctgagcgagtgctctggcaacattcgacacggctctgtgtatctgacccaagacccttatggcatgagctaatgggaggatcttctgatccatgcgtggcaaagatgcatgggagaaacatggtttgtgggtaggggttgtgcattcactactgcttctcttggctgtaggtgaaggtttctttggctctgtgctgatactgggtgcaccatcacccaccccctttgtttcttctcctgggtcaagtcatttgcctaatcagtcccaatgtaggaacctggatacttcagttcaaggtgctgaattcaccgtgcttttcattcaggggaagacagctgcttctcattgggcatcttggcctgcccacttcacgtcactttttgtaaaatccacaccactccaggaatatccattacttaacttcgcctgaaataaacagaaggctcattacacttatcatgggctcacttacttcgcctataatgaaggtgccatggaaatgctagtggatgacgtggtccattttcttagggatgagatagaaaaatggtgtatggctttttaatttaattaaaatttttagtttggtttaaatttacattggtctctttttggttttgttgcctgtacttttgaagtcttactcgtgaactctttactggacaatgaccagaagagttttccctaagtttcttctgatattttgaccatttcagtacatacatttcagtctataattcactttaaattgatttttgtaaacatggtaagaaataggagttcagatttattcttccgcatatgataatgcaactgtcccagtaccaattattgaaaagggtgtgctttccctagtgtatattcttgtcagctttgtcaaagatcagttgcctatgaatgtgtggctttcattttggattctctcgtctgttacatcaatctgtgtgtccacatttatacctgtaccatgctgtattggtgactatggctgtgtaatatattttagagttaggaaatgtgatgctcccagctttgttcatttgcttcagctgaaaaggttgagtccacaattacaaagatggcagccgcccatccccggaggacctccaacccagaaagagatcaggcttcccaccaaccctataaccctggctggagttcctgaaattccaacagggaggaccttcccagtgaggagggatgaatcaaggtcaaatttaaagaaacagtctggccactatcaggcacagcagcagtgctgccttgtgggggacccctcctgctccagaccagctgccctccctggagcccgaaggctagattgtctgagtctacggaaacagagacggtggccgccccaaccacccagaactcggtagtctcaggcacttggcttgctatcttgccactgcttggctggtattccaagcccgtgggacttgagaagtgctgtgatgatggggaccacaggatgaggctgtctggctccctgtgatatggctgtgatgagtggaggaacaccagggctcatgtctcacacagaattggagaaaatgacacaaacacatgtacagtggttttatggcgtgcagtttaataggcaagaacgaaggaagagctccccatactgagacagagggaggggggctccaaagccaaaagaggaaacccggagtgctgtggataccaatgagttatatgaagaaactggagggggcggtgtctgatttgcatagggttcaggcgattggttcgaccaggcatgtcatttatgtggcccacggaaaaactggccctcccacctagcctttgaatatgcacgtgccggacaccctgatttcctacactcatggggatatatgggggtggccatatcgccaggcacaggtggggacaagggccagaagagggcgggaatcgctatgtttgggtggacccagtttctaatggccggcatctgcagatcaaggttaccggagaactctaaaagccggggctttcctgctagacaagactcatttctggagctgctttaaaaagaaacaaaacttcccaaggaccccttttcctccctgtctgcccaaaataatttcttaacaactcgtataacacctgaattcagcccccttactgggggaatgtaccaacggaactcccacctttcctggtttctcaaggctagattgtgtaaacctcctgggtctcggtctgtgtctgagcagctgctctgccaacactccacacagccctgtgtactaggcccaaggccgccgtgactcagcccatgggaggatctcctgatttcttggttgcaaagatccatgggagaaaaatggtttctggggcggggtcacacactcatggcttctcttggctgtgcaagaaggttcctttggctctgttccaatatagcgtggttcatcacccacccctgttttctttgttctcctgagtcaagttgtttgcctagtcagtcccaatgtgagaacctgaatatttcagttcacgtgcttatcgtgaaattcactgagactttaattcagtggaaggcagcctcttctaattggccatcttggcccgccccctccacgtcacctcccataaaatggccacgctctccagggacgatgccattatatatctttacgtgaaaccgacagaacacttattacactttttgtgagctcatttacttcacttataatgaacatggccatggaaatgctagtggagaaagtggtcgattttctgatggatgtgataaaaaaatggtttgccgaccaattaatgacatatgtctcaaaactagtaacgagacccttaatcgctgggttgaagtttctaatcaagaagatgctcatctatgtattcaacaaagcagcttcccttgcttctgaaatgcttccaaacaacatctcatatttcctgaagaagataatgcctggacaagcagcacaagtcattcaggtttactttcagctcataaatccagcaggatattcgcacaattgttgggaaaccttatcagttcatgagtcgtgcatgtttcctttaatttcaggaggaagagggtaatctggaagagtttcctgacctactctgctgctgtgattaaacaaccaccaggaaattttgatgacactgttctcctgagctcctccctttcctcggggaagaaaagcattgaaactacaaaaataaagtgttatttggctggagtgaggtctcatgtctgcttatgcggtggctcgctgctcagaacagggtgagtctctgagttgtacgctgaggaggggaggctgtcaatctagaaaaaacccattgcatgggacacctccatggggtctggggggctgaggatgaggagctggactggatctagggaaggaggaggtttcagagggtgaaattctggcagtaaatcctgggggtgtttgaaaacttcctccctcagaaggagaagactcagggaggaataaggacaaaccatgggtcccttgaggggcatttactaacttaagaggactttatcgggaagcagagtgacaatggcctccttgaggactgaggcccctggataaatgaggcccagatccagatccagtccatgggagatgagaccttcaagggacatatttttgttgggacagaggaaaagtgcagctctgcagctgcagaggaagccttggcagtgtgaaagcgaccttggagggggccctgtgcgttctgaatgcttctgaggtccatcccctgtccccgcctctttttctggattttttgggctccatggtctccgccatcttctgagcgctccacgctgccaccttcagttttctcttctgggctccaaatactccaaaatctttcatatctgtgcccctacccctgtttttagcatgtgttgggactccaggtccctgaaggtttctggcctgaaatccacctccccagcggtgtggattctgctctagagaccccgcacttggcaaggttcccaggcccctgggggacaaccgagtggtatgtgcacttcagggctccacactcggcaaggtctttcaagcccttggggttccctcctcagttttcttcacatgtctgggatgtagtcactctataaatgccgggatgtgatccccaccccagtgattttttttagttccatgagtgttgctatctgaatagtcatcctgagagtgatgggaccttttgaatttgcagcaagttttagattagtgtgagtggcctgagatcgcaaaactggggctagcattggatgtgaggttaggctggtggaaaaatttgcccagaacctgaggagtgtgggctcactgcaggtggttaggatcagcacagaattgcaaggatgtatagctttggggtaaagaataacatggttcagaagtacatgtattagtcttttcatgcattgctataaagaattacctgagactgggtaattaattataaaaactcaggtttaattggctcatggttccacaggctgtacaaaaaggatgatgctggccatcagctcaacttctggggaggcgtcagaaaacttagagtcatggcaaaaagcacaagggaatcaggctcatcctccatggccagagctggagctagtggtaggagaggtgctgcacacttttgaacaatcagatctttttagaactctatcaccagacagcacctagaggatggtgctaaattattcatgaaatatccacccatatgatccactcaattctcaccggcccaaccaggaccacctccaccattggggattacaattacacatgagatgtgggtggggacacagatccaaactcgatcagtgggcatcttggactgggtctactatagaagaagaaccaggagctgactatcatccttaagactgcccatgatggccaggcagggtggctcatgcctgtaatcccagcactttgggaagccaaggtgggtgaatcccctgaggtcaggagtttgagaccagcctcgccaacatggtgaaaccctgcctctactaaaaacacaaaaaattagatgggtgttgtgccagacgcctgtaatcacagctactccagaggctgaggcatgagaattgcttgaacctgggaggcggaggtggcggtgagccccaatcgcactgctacactccagcatgggcaacaataccaaaacatcgtctcaaaaaaaaaaaaaaaaaaaaaaaaggctgcccatgaccactgccccagtgagagggacaccagcatggctaagatcaagtgctggacattcttcatgggtcagacattaaagcaggccacactgttacagagatgggctccattcatagcaacaaagtggtgagaagatgtgggaatggcagaggccagcactttgccatcaatgcaaggtgggcataaggagctggcaccagtgccagagtgcatcaggggaggactgctttgcaatatctagcacttacctcttagagtatgtttcattagggacaacagatataaatggcagacaagtgagtcccttcagtaacaggaaatagaaatcatcaagaggaacagaaacagatgtcagcagccctcatataaagtcatcatccttcatccagttaaaacctgagacagttctcacataagaaggtctaattcaaaaagagactgggttctcatgaggcaggttcatgcaaaaccaagggaagtatacaactttgggattctccagcttcccttggaaaagacctacaatcatttgcttaggtaactgagcactgaacaaaggtgagtattgttatctttcagaagctgttggccatgaaggtcttgctggcataaaacccatggttggaaacatcaccatgacccctgttagagtaatggcctaagggcaagggtcaggaaattgatgtattccttgccaacttctgcgagacgagtgttggtccactcatctctttcacggaattcaccagtctggtatcttcaaaatccagaaggatgatggcagatggcaggaaactaatgcaaacaccatcagttgtacctccactgtagcagcagtaatggatgttatctcttcattgtaatatccagggagggagaagatgacattattctcaatattctaaacaccctgtgtgtacagcctctgtgatattttttgtaatatccgtgtgggagagaattatattactcctaatatctcaggggttgtgccccctctgtgacaatgttcctaacacccaggaggggataggatgatatcacttttagcatcacagggggtgtacaccccactgtaatattgttcataatatccgggggggagagaatgatattactcccaatatcgcaaagactgtacaccaacctgtgatattatttgtaatatccataagaggaagaataatattactcccaatgtcacaggaagtgtacacccttctgtgatattgttcaaaagatccagttagggaggggatgatattactctcaatatcttaaacaccctgtaggtaagccctctgtgatattcctcataatatccagagggagaggatgatattactcccaatattgcatgaagtctacaccccacctgtgatattgttcctaatatccaggatgggagaggatgatattactcccaatgtcgcaggggatgtacaccttccctgtaatattgttcgtaatatctagaaaaggagaggataatattactttcaacatcgcagggggtgtacaccttccttgttatattgttgctaatatccagggaaaaagaagatgacattaccaccactattgcagaaggtgtacacccccccttgatatagttcctaatatccagaaaaggagaggagatattactccaaatattgcaagaggtgtacattcccctgtaatatttttcctaacattcaggaagaaagagagtgatattgcccttaatattgaagggagtgtgccccccccgtgatattgtttctaatatccaagaaatgaaaggatgatattactcccaatatcacaggggctgtacagccccctcccatgatattgttcccaacatcggggggggggtgaaatagtattattcccagtatcacaataggtgtacacacctgtcgtgatattgttcctaatacccatgggggaaaggacgatattattcttaatatctcagagggatgtacaccctccctgtgatattgttcctaatatccggggtgggagaggatgatattacccccaaaatctcaaagggtgtacacccctcttgtgatattgttcctaatatccagggtggagaggataatattattcccaatatccaggaaaggaaacgatgatgttactgtgaatattccagggggtgtcctcccctctgtgatattgttcctaatatccaggttggggagattatgatatttctccaaatatcacaaggggtgtacaccaaccctgtgttattgttcctaatatcgatggggggagaggacgatattactcccaatatcacagggggtgtacaccacctttatgatattgttcctaatatccatgaagaaagaggatgatattactttcaatatcgcaggggatgtacactccccctgtgatattgttagtaatacctaggagaagaaagtgtgatattactcccaatatcgcaggggatgtacacgcttcctgtgatattgttcctaatatttagggggaaaggggatgatattactcccaatatcgaatggtgtgtacacccccccgtgattctttttttttttttttttttttttttgagatggagtcttgctctgccgcccagactggcgtgcaatggcgcaatctcggctcactgcaacatttgcctcccaggttcgcacgattctcctgcctcagccttcggagtagctgggattataggcagctgtcaccataccaggctaatttttgtatttttagtagagttggggtttcaccatgttggtcaggctggtcttgaattcctgacctcaaataatccacccaccttggcctcccaaagtcctgggattacaggcataactttccctgtgatattcttcctaatattcaggaagaaagaggatgatattgctcccaatatcgcagagagtgtgcactcctcctgtgatatggttcttaatattcagaggaggagaggatgatattactttctatattgcagaaggtgtacacctccctcgtgatgtctttcctaatatccagtgggggagaggttattagtctcaaaatcacagaaggtgtaaacccccatttgatattgttcctaatattcaggggtggggagagaaaggtattactcctagtatttcagggcatgaacacccccaccgtgatatcattcctaatatccagaaggggaggcaatgatatttctcctaatatcacaaagggtgtacaccccttctgtgatattgtaaatattctgtgtgtacacccccctgtgttatagtctgtaatatccgggtgggggagagggtgatatttctccccatattgtaggggatgtacacccttctgtgatatggttcgttatatccagggaagaaaaaggtaatattgctgcccatattgtggagagtgtacacccccatgtaatatggttcgtaatatccaggagtggagagggtgatactgctccttacatcgaggaaggtgtacaccttattgttatatgattcgcaatatccaggggaggagagagtgatattgctccccatgtcgcagggggtgtaaaccctccgtgatatgattggtaatatccaggaaaggaaagggtgatatttctccccatatcgcgggggacgtacatcctcctgtgatatggttcgtaatatccaggaggaaagaggaaaatattgctcttcataacccgaggggtgtacaacccctgtgatatggttcgtaatacccagaagtgtacacccctctgtgatatggtttgtaatatccagggggttagagggtgatattgctccccatatcgcagtgggggtacacccccctggattggttcataatattcatggggggagaaatttacatttatcctcatatcagggggggtgtacaccccccgtgatatggttcgtaatatccaggggaagaaagggtgatattgctccttatatcgcggaaggatcaccctcccctgtgatatggttcataatacccagacgggaagagggtgatattgttcttcataaagcgaagggtgtacagccccctgtgatatggttcataatatgcaaaaggggagagggtgatattgctccccatatcacggagggtgtactcccttctttgatatggttcgtaatatccaggggtgtagatggtgatatagctcgccctattggggagggtgttcacccctctgtgatattgttcgtaatgtccagggaaagagaggatgatattactcccaatatcgcagaaggtttacaccactctgtgatattgttcataatatccagggaaggagaagacgatattactcccaatatggcagggggtgtagaactcctgtgatattgtttgtaatatccaggcaaggagaggatattactctcaatatcgcagaaggtttacacccctatgtgatactgttcatgatatccagggaaaaagaggatattactccctatatcacaaagggtgtacacccctttgtgatattttttgtaatatccaggggagagaggataatattactctcaatatcagaaggggtgaaaaccctcctgtgtcattgttcataatatttagggaaggagagagtgatattactccaaatatcacagtgggtgtacacccccctatgatattgttcctaatttccagaaggggagatatgatattattgccaatatcgcagaaggtgtacaccttactctgacattgtttgtaatatccagatggggaaatgatgatattactcctaatatcacagggggtgtacacccccttgttttattgtttgtaatattcaggggaagagacgattatattactcccaatatcgcagggtgtgtacaacactctatgatattgttcataatatccaggggaggagaggaagtgtacacccccccgtgatattgttcgtaatatccagaggtagagaggatgatattactcccaatattgcaggtggtgtacacctttctgtgatattgtcatgatattaagaaggggagaggatgatattactaacaatatcacaaaaactgtacactccctgtgatattgttcataatatccagaagaagggaggatgatattattctgaatctcgcagaagatatacaccaccctgtgatatggttcataatatcctaggggaaagaggatgacataactgtcaatatcgcagggggtgtacaattccctgtgatattgttcacaatattcagagggaaaaaggataatattactttcaatatcgcaggcggtgtacacattactgtgttattgtttataatatccggaatgagagaaaattttctcccaatatcacaggaggtgtacactcccctgtgatattgttcgtaatatccagggaggggagaggatactattactcccaacatctcagggagtgtaggccccccctttgatattgttcctaatattcggaagtggagaagatgatattacttccaaaatcgcagggggtgtacactccctctgtaatattgtttctaatattcatgagtggaaagaaagatattactcccagtattgcaggggacatacaccacactgtgatcttgttcacaatattcgggggggagaggatgatattactcccaatatcaaagtaggtgtacacccccttctgatattgatcgtaatatccagaattaaagatgataacgttactcccaatattgcagggggtgtacatttttgaatactgttcataatattaagagggggaggggatgatatctgtcccaatatcgcaaagtgtgtacacctcctgtgacattgtcccaaatatccagaggaaaaaaggatgttattactcttaatatctcagagagtgtacacctccctgtgatattgtttgtaacatccagaagaaagaggctgatattactcttaatatcgcagggggtgtacacccccgccccgggatattattcgtaatatccagggggaagtggaatgttcagaatgggagaggatgatattacttgcaatatcatagtgggtgtacaccccactgtgatattgtttgtaatatccgggaaaggagaaaatgacattcctccccatatggcaggggctgtacaccacctatcatattgttcaaaatatccagaaggggagaggatatgtctccaagtatcacagggggtgtacaccccgctgtaatattcttcctaatatccagggtgtgagaggataatagtactcccaatatcccagggcatgtacaccccccttgtgatgttgttcctaaaattcatggggagaaagaatattactcccaatatcacagggggtgtacatacactctgtaatattgttgccaatatgcagcaggagagaggatgatattactcccaatatcacaggggctgtacaccccgctgggatattgtttctaatatcaagggggaaaaaggatgatattactcccaatgtcgcagggtgtgtacttcctctttgtgacattgttcctaatatccaggagagaagagggtgacattccttccaaaactgaaaggggtgtacacaccctttgagatattgtctttaatatccagaacgaaacaggatgatataactcctaatactgcaggggggtacaccctctctgtgatactgtttctaatatccaggaggggaaagaaaaatattaatcccaatatcacagggggtgtacattccccctttaatattgttcctaatatccaggaagacacaggatgatactatttccagcagcacagggcatgtacacccctttgtgatattgttcctaatatccaggaaaagagaggatgatattactgtcaatattgcagggcgtatacactggttctgtgatattgtttctaatatccgggggtggagaaaatgatattactcccaatattccagcgggtgtacacccgttctatgatattgttcctaatatctgggggagagagaatgatattattgtcaatatcacaggggatgtacagattccctgtgatattgtttctaatattcacagggggagaagggtataatactcccgatatcgcagggggtgtacactccccctgtgaagttgttcctaatatccagggattgagagaatgatattactcccaatatcacaggcggtgtaaaccccctgtgtgatattgttcctaacatccagaggaaaagatgatgatattattttcaatatcacagggggtgtacgcatccctgtgatattgtttctaatatccaggggaggagaggatgatattattgttaatatcgcagggggtgtaccccaccctgtgatactgttcctaatatccggggtggaagaggataatattgctcccaatatcgcaaagggtgtacaaccttcctgagatattggtcctaatatccagggagggagaggatgatattactttcaatatcacagggagtttacacaacccctgcgatattgttcctaatatccagcggaagaagagttaggataatactattttcaaaattgctgggtctgtaccccctccccgtgatattgtttctaatatccaggaggggagaaagtaatatgactcccaatatcttagaagatgtacaccctccccataatattatttcttacatccagggggtagaggatgattttgctttcaatatcacagagggagtaaacctttccggtgatattgtttttaatatttaaaaagagagaagataaaattactcccaatacaaaggggatgtattgtgtactcccccctctgatattcttttttaatatccagatggagagaggatgatattactttcaatattgcatgggatgtataaatcccctgtgttattgttctgaatatacaggtggggagagtatgatattactccaaatatcgcagggggttctttccccctgtgatattgttcctaacattcagggagggagaggatgatattactcttaatattgcagggggtgtacccacgcctatgatattgttcctaatatccagagggggagaggatgatctaactcagaatatgacaaggggtgtacacacagcctgtgatatggttcctaatatacaggggagaaggggataatatttctcccaatatcgcagggggtgtacaaccccctgtgatactgttcctaatatacagaaggggacagcatgatattgttcctaatatcgcaggaggtgtacaacgccctgtgatattgttcctaatatccagggcgggagaggatgatattaccctcaatatcgcagggggtgtgcactttccctgttatattgttcctatgatccgggtggggggaaatgacattagtcccaatatcgcaggatgtgtgcaccgctcccccgtgatattgttcctaatatcaagggggagagaggaggatattactcccaatatcgcaagggatgtacatcctccatgcgatattgttcgtaatattcaggaggagagaggatgatattactcttaatatcgcagaaagtggacacccaccctgtgatgttcttcataatatccagggaagcagacgattatatgactttcaatatcgctgggagtgtacatcccttttgggatattgtttctaatatccaggaagggagaggattatattactctcagtattgcaggcagtgtacaccttttttgtgatattgttcctaatattcagaaagggaaaggatgatattactcccaatattgcaggtggtgtatatccccctctgatattgttccttatatcaaggaagagaaagaataatattactcccaatatcaaagacagtgtagacccctcctgtgatattgtatttaatatccatggggaaagaggatgatgttactcccaatatcgcagggggtttacacccacactgtgatattattcctaaaatccagtggaggagaaaataatattgctcccaatattgcagggtgtatacaggccctcccccgttatattgctcctaatatccagcggtggagaggatattactttcaatttgtgtagggagtgtatacccccctgtgatatttttctaatatcaaggatgggaaaggatgacattactcccaatatcgcaggaggtgtacacgccctgtgatattgttcctaatatctagggaaggagaggatgatattactttcaatattgcaggagctgtacaccctctgtggtattgttcttaatatttaggttgggagaaaatgatatgagtccaaatatcgcagaaggcatacacacttccaataacattgttcttaatatccgggggagagggtgatattactcccaaaatctctggggggtgtacacccccttctgatatttttcctaatatccagggaaggaaacgatgatattactataaatattccaaggagtgtacaccttcctaatatcctaatattgttcctaatatccaggggtgggagaggattatattactcccgatatcgcagtgggtgtacacccctcctgtgatattgtttctaatatccaagctaggagaaaatgatatcactctcaataccacagggggtgtacaccttccgcatcatattgttcctaatattcagagggaaagaagatgaagttactttcaatatcggaggggttgtacacaacccctgtgatattgctgctagtatccaggaagaaaggggattatgttactccccttatagcagggggtatacacctcccctgtaatattgttcctaatatcaaggctgggatatacgtggggggaaggatgatattactcccaatatcgcaggggttatacaaccttctgtgatattgctcctagtaaccagggcagaagaagatgatattactcctaatatcgcaggaggtgtacactcccccattatgttgttcccaatatgcagaaaaggagaggatgacattattgccagtatcgcagggtgtgtacaccacccctgtaatattgttccaaatatttagggggagagaggatgatattactcccaacatcgcagggggtgtacacacatcccctgtaatatagttcttaaaatctaggggaaaaggggatcttatttctctaaatattgcagagggtgtacactccccggtgatattgttcctaatagccgggagggagataattaaattactttcaatatctcagagagtgtacatcgcccttgcgatattgttcctaatatccagagcaaaagagaatgatattactcccaatatcttaggagtgtacatttaacctgtaatattgttcctaatatccagggggaagagaatagtattactgccaatatcgtaggggttgtacaccttttctgtgatattgttgcaaatatttagtagagggaaagaatattactcgcaatatcacagggaatgtatacttcccctgtgatattgttctgatatccagaaaaagagagggtaatattactcccaatattgcagggggtgtacaccccccttgtgatattgatcctaatataaaggaaggaagaggatattactcctcatatagaaggggttgtccaccccccttgtgatattattcctaatattcagggaagcagaggatgatattattttcaatatcacagagggtgtgcagtccacctgtgatattgttcttaatattcggggggagaggatgttattatgcctgatatcgcagtagaggtacacccctcaagtgatactgttcctaataaccaggggtgaagaggatgatattactcccaatatcgcaggtggtgtacacccccccatgatggtttctaatatacagagggggagaggaaaatattactcccaaaatcgctggaggtctacaccccccttgtgatattgttcctaatatccaggaaaggaaacgatgatattactgtgaatattccagggggtgtacacccgctttgtaatattgttcctcatatccagggtgtggagaggattatattactcccagtatcgcagggggtgcacgacgcccctgtgatattgtttttcatatccaggaggggagattattatcaatatggcaaggggtgaacaccccctgtgatattgtacttaatagttaggttggcagaaaatgatattagtctcgatatcgcagggggtgtgcactccgcctggtgatattgcttttaatatcaagggggagaaaatggcattactcccaatatcgcagggggtgtacaccgctcatgtgatattgttcctaatatccaggtggagagaacataatattactcccaatatcgcacaaggtgtacacccctcctgtgatatggttcctaatatccatgggaggagatgatgatattactcccaatatcacaggggatgtacaccacccttgtgatattgttcctaatatccagggaagaaaacgatgatattattgtgaatattacagggagtgtacacactccctgtgatattgtttttgatatacagggtgggagaggatgatattactcccaatatcacataaggtgtacaccccccgtgatattgttctaaatatttcggtggggagaaaatgatattagtctccatatcacagggggtgtgtgctcctcaggtgatattgtttttaatatcaagagggggaggagattatattactttcattatcacagggggtgtacacccctcctgtgatattgttccttatatccaggcgaggggaaaataatattactctcaatatcgcaggaggtgtacacaccccatgtgatattgttcctaatattaagggggaaagaagataatattactttcaatatcacagggtttgtactcctttcttgtgatatagtttttagtatccagggggaaagagcatgatattactcccattgtagcaaggggtgtacacacctcctgtgatattgttcctaatatccagaagtggtgaggatgatattactcccaatatcgcagggggtatacaccccacctatgatattatttctaatatccatgggaaaagagtatgatattacacccaatgtcgcagagggtgtgtatttttcctgtgatattgtttctaatattcaggcggggagaagatgatattactctcaatatagcagaaattgtacatccccgctgtgatattcttcataataatcagggaaaaagaggatgatattactaccaatattgcaggggggttacacttcccctatggtagtgttcctaatatccaggaagaaagaggatgatattaatcccattatccaggaagtgtacacccaccctgtcatgttgttcctaatatccagcagggaagaggatgatattacaccccccccccgtgatattctccttaatatccaggaggggagaggctgatattactggatatatagcaggggtgttcataccttctgtgatattgttcctaatatccagaaaaggagaggatgatattacttccaatatcgcagaaggtgtacacctccctgtgatattgatcctgacattcagaaggggagaggatgatattactcaaaataccgcagggcatgtgcattcccttgtgatattgttcctaatacccagaagggaacaggataatattactttcaatatcgcagggagtgcacacccccctttggtatggttcttaatatccagaaggaaagagggtgctattactttccatattgcaaggggtgtacaccccactgtggtatggttcataatatccaggcagggagagggtgctattactccccacagtgcggggcatgtacaccctgctgcggtacggttcctaatatccagggggagagaggatgctatgactccctatatcgcggggtgtgtacacccctgtgtggtatgttttgtattctccaggaacggagagggtgttgttacccctcatatcgctggaaatgtacactcccctgtggtatggttcgtaatatccaggggattgagggtactgttacccccatactccccatatcgtggggggagtgcacctccctgtggtatggttcgaaatatccagggtaagagagggtgctattattccccattttgcaggaggcgtacacccccctatggtatggttcgtaatatccggggtgaggggatgctatcaaaagaagagagaaagagaccccccatattgttctatattattttatactcagtacctgttttaagaagaaacaaggaagtgaaaccaaaagcaggcagcccggcgccaggcaccagacccaaaaccagacccgaaaccaggcctgggcctgcctgaccttagcctgatagttaaaattcaacccatgacctagcaaccaatgttatccatagattccagacattgtatggaaggacattgtgaaatttcttgttctgtgctgtttcactctgattaccggtgcctgcagcccctgtcacatacccactagattgctcaatcaatcatggccctttcatgtaagatctttagtgttgtgagcccttaaaaaggacagaaattgtgcactcaacaagctcggattttgagacgctagtctttcgatgcttccagctgattaaaagccacttccttcactacctcggtgtctgtggggttttgtccgcgactcctcctgctacactatgactccccatatcaaggggggtgtacacccccctgtggttcgtaatatccagcaggggaaaaggtgctattactccccatattgcagggagtgtacacccccttgtagtatggatcgtaaaatcaaggggggagggaaggtgtaattatccccatatctcagggggtgtacacccctttgtggtaaagtttgtaatatccagggatattacagggatattatccccaaattaatacttttataatttcttatgcctgcctttactgcaatctctgaacataaattgtgaagatttcatggacatttatcacttccccaatcaatacttttataatttcctatgcctgtctttactttaatctcttaatctcatcatctttgtgagctgaggatgtatgtcgcctcaggaccctgtgatgattgcattaactccacaaattgtttataaaacatgtgtatttgaacaatatgaaatctgggcaccctgaaaaagaacaggataagagcgatgttcagcgaacaagggagataagcataaggtctgactgcctgtggggctgggcagaacagagtcacatttttcttattgcagaaaatgagtaggagaaatatcactgggaagggaacgcattcctaggggaggcctatggacggccgctctgggggtgtatcccttatgtggttgaagataagggatgaaatacaccctggtcccctgcagtgccctcaggcttgctaggattagaaattccagcctggcgaattctagtcagaccagttctctgctcttgaaccccgtttcctgttaagatgtttatcaatgacaatgcgtgcacagcaggacatggaacctcaatagtaattccattttctccctggccttgtgaccttgctaggcccttctgcccttgtgatcttttattgccatttgaagcatgtgatctctgtgacccactccctattcgtatccccctccccttttgaagtccctaataaaaacttgctggttttgcagatcaggtggtcatcacagaacctgccgatatgtgatgtcaccccggaggctcagctgtaaaatttctctttcgtactctttcactttatttctcagaccaggtgacacttaaggaaaatagaaaagaacctactttgaaatattgggggctagttcccccaatagacattgttcctaatatccagaaaaaaagaagatgatattactcccaatatcacaggggttgtgaaccccacctgtgatatggttcctaatatccaggaagggagagaatgatattactctccatattgcagggggtgtgcacatccctgtgatattgttcctaatatccaggggaggagagggtgatattactcccaatattgcaagggttgtaaactccaccctgtaatattgctcctaatatttaggatttagggggggagaggataatattactcccaatatcgcaggggatgtatatgccctctttgatattgttcctaatatccagggggggagaggataatattactttccatatcacaaagagtgttcacccccctgtgatattgttcctaatatccaaaaaggaagaggatgatatcaatcccaatatcacaggaagtgtacaccccccccttttatattgtttctaatatccaggggaaatgagggtgatatttctctcaatatagcagaatgggtacactccccctgggatattattcctaatatccaggggaaaaaaagaggttgatattcttcccagtatagcagggaatgaatacaccctttgtgatattgcttctaatatcaaggggaaaagaggatgatatgactcccaatatcacaggggatgtaaacctgtggcgttgttgctaatatcaaggagggaagagtatgatattactcctaatgtcgccgaaggtgcacactttccctgtgatattgttcctaatatccaaaagggaagagaatgatattacccccagtattgcagggtgtacaccacccctgtgatattgctcctaatacccaggaaaaaagagaatgctattacccccaatatctaaggggacgtataccttccctgtgatattgtttctaatatccaagtggggagaggatggttttactctcaatattgcagggagtgtacactccccctgtgatactgtttctaatactcgggctgggagaaatagtattactcccaatatcgcagtgatattgtttccctgtgatattgtttctaatatctagtgggggagataattatattactaccccatacacaggggagggtgtacattcccctgtgatattgtttgtaatatccagggaaggagaggatgttactcccaatatcacaggggttgtacaccccttttttgatattgttcctaatatctggggggcagagaattatattactgtcaatatcacagagtgtgtacaccccctctgttatattactctttatattcagggcggtagaggatgatattactccctatatcacagggggtgttcacccctcctgtgatattgtttataatatctaaggggaaagaggatgatatcactctcaatatcaaaggaaatgtacacctttcctgtgatattgtttttattatataggggggcagaggatgatattaagaacaataccacaggggatgtacacccacgtattgatattgtccctaatatgtatggggaaagaggacagtgtaactcccgatatcgcagagtgtgtacacccccttgtgatattgtttctgatatacacggggagaaaagataatatttcttccaaaattgcagggggtgtacaaccccctgtgatattgtttttaatatccagtgggggagagaatattactcccaatattgcagggcgtgtacacaacccctgtgatattgttcctaatatccagagtaggggaggatgacattactttcaatatcgcaaggggtgtacattcccctgtgatattgctcctaatatccatgaggggagaggatgatattattcctaatatggcaggggctgtacaccttccctgtgatattgtttctaacatccagtgggggagaaaatgatattactccctatatcacagaaggtgtacactttccctgtgatattgttcctaatatccagaaggggagaggataatattactcccaatatcgcaggaagcttacaactcccctgtgatattgtttctaatatccagggaggtagggatgatattactcccaatatcgcaggggatgtacactcccccgtgacattgtttctaataaccagggggtgagaggatgatattacgcttaataccgaagggggtgtacacacccttgtgatattgtgcctaatagccagggggaagaaaattatattaattttaatatttatggggaaaaaggatgatattactcccaatatcacaggggctgtacaccgaccttttgatattgtttttaatatccagaagagaagaggataatattgctcccaatatcagaaaaggtgtaaaccccttctgtgatattggtcctaatatccagggagggagagaataatattactaccaatatcacagaaggtgcccacccccaaggtgatattgctcctaatatccaaagataatagggtgatgttactcccaatatcacaggaggtgttcacaccccttgtgatattgtttctaacgtacagggaagggagaggatgatattattcccaatatcacaggaggtgtatactcctctgtgatattgattttaatattcggggggaaaggatgatattactccctatatcgcagagggtgtacaccctctgtaatattgatcctaatatccagggcgggataggatgatattactcccaatatcgcagaaagtctacacaacccccagtaatattgtttttactatccagggggaagaggatgacattactcccaatttcacagagtgtgtacactcaccatttgatattgtttctaatatctagggggagagaatatattactcccaatatcacaggaattgtacaccacctctgtgacattcttgtgaatatccggggaaaaagagaataatattactcccaatattgcagagcgtgtacacccctccatgatatcgatactaatatttttttaaagaggatgatattactcccattgtcacaggatgtgtacaccccccttgtgaaattgttcataatattctggggggagagcataatattactccccatatcgaaaaaggtgtccaccctccttataatatggttcctaatatccaggatattacttaatccaggatacttgtaataccctaaatatacaattgcttgaacctccacctcccaggttcaagcaattcttctgcctcagcctcccgagtagctgggactacaggggcacaccaccacacccagctaatttttttttcttgtatttttagtagagatggggttttgccatattggccaggctggtctcaaactcctgaccttgtgatctgcccacctcagcctcccaaagtgctgggattataggcgtgacccaccgtgccaagccaggaagaggatgctctatagatttccccaataagagatggctttgcagggccattccaaaatatgtcaaagaaatacatttggggataaaatactttgatttcctttagggaatgttatctattatgtgatgctataccagagtcaggttggagtcggttatcttattgcaacaaagagtctgttccgtcactgttgggatctctattttttcctcttatttcttgagacagggtctcactctgtcacccagtctggagtgcagtggtgcgatcttcattcactgaaacctctgcctcctgtgttcaggtgattctcgtgcctcagccccttaagtaactaggattacaggtgtgcgccaccacacccagctaatttttgtattttcagtagagatggtattttgccctgttggccaggctggtcttgaactcctggcctcgtgtcatctgcccacctcgacctcccaaagtgctgggactgcaaatgtgagctattgtgcccagccaggatctctgttttaatgttagtgctggtcactttgcatgaactccaaagggaagaaatataatgaggtgtgtctgaccccctgccttctcatcgtgacctgaattagtttttcaggtttgcaggggatacccttggacaagaaggggctctattcggttggttggggggattagaattttactttttgtttacaatatttctcctgaaagagttaggggctcacaaggaatttccgcgtgagcaacttatgaggaaagccatctgggaagatatgtgtccttgtgtcactgggatattctcgtttaccccaatgatacggcaatgacgcagggttgtgaaattacagctatgtgtttggggaaaaaagaaagcaggattgtgtgactacgtttccaaacttcacttgcccttagccatagtgagttgggggcctggagattctgttttctttcacaatgatatagatacaattaaatgtatagaaagcaaaaaaataaaaaggtgagtaatgaggaacctctgattcctgagtggccatgtagttacccatggcacagagccacagttactgaaggtaaagtttgctggggaatttagaaatgaatccagctcttggaggagtcagtttactggatgcctaagaaaatgcaaacaaaataagaaaaaagggtaatattcaatcccatagttattgttacctgtcatagctaaagtaaaattaaaacagagtgctggcttcaatcttgatgctacactaagcttagatttcagtgaatgtgagtctcagccactagctcagagccacctcccaaagaccaaatcatgtagggacaatagaaagtacttctgagaattgtggttaccaagaacctagtaactgttggggaggagcaaaacaaagtacagaaaccagagggtacaatctgagtgagactgctatcagcttctggaggagcctttactaaaatgaatgatgagagtaactggatgatgagagtaactaatggatgatgagagtaagcaatgtctttggttttcttttttttttttttttttttttagcagacgtctcactcttgtcgcccaggctggagtgtaatggcatgatctcgcctcactgcaacctccacctcctgggttcaagcaattctcctgtctcagcctcccgagtagctgggactacaggcactcatcaccacacctggctaatttttgtatttttagtattttctggtgagggtccaggtttccggaaacaactcagagacatatgttaagatgttatctttagttttcacagggaaccaaatatgttacgactccaatttccttggctattgttttaagttaccattaccttctcgttgatcaagttgctcatttacttctcaagcctagctagatgcctggaatttcccttgaaggaagtcaagattttcctttatctccatactggctgatggtgatcgagtaagcccctaagaggggtccctgctccatctcgagatgctgctagattctacagtgcctaataaacagctctcgcctggccgacaaagagctgcttgctctctggatagcaattccaaagtgaacagacaacatcctgtttggaagactgccactctgttagaagaagcatcaggaaaacctttcttttgagctatttataactaacagcaattgaccaagtatacttttgtgagtgaaactgacctttctccctgtaagaattctccaaaatttggaaactatttgtgagtatttttacttatggcaatataattattggcacaagctcaatcagattcggttttctttcgtaacaggaaccattggagatactcattactctttgaaggcttacagtggaatgaattcaaatacgacttatttgaggaattgaagttgactttatggagctgataagaatcttcttggagaaaaaaagactgggtatattttcaatatgctttccttttaaggtccctcacctgtggaaagtaaagaatgtcactttctgacaggctcaggaacctcaagttatgtagggatctcaagaagatgggggaattcacccagttcatacaggtgaaattgctgttgcaaagattatgaatatgagagaagtccagcatggctgacttcatctcgtgtctggcctcaggctggctgcccttgctcactcttgggcataggccaagctagccatgggaggaatttagtttatagtttaactttgaagcacggatgataatagtctctccctaaaatgaaccccttccttgctcagggactgaaactacctttgtatgacaaatgaaagcccacaagattaagattatgagaggggcctgaattctgctaaaatgcaggtgtagctgactgataacaagtcattgtcccacagcttgcctttctataatctcttgcttctcaggagtcacatggccagaggtcctgagatttccagtcctgtgacccccacccagagatggacttagtgcatgaggaccattttccacacccctatgatttcatcctcaaacaatcagcagcaaccattccctagccccctgccttccaaattatccataaaaatcctagcctctgagttattagggagattgattaataatcccagtcctaccccttgggttgctctgatttaattaaaccttctctactgcaataccacggactcagtaaattggttttgtctgtgcaatgggcaagaagaacatgttgcatggttatacaggtactacaagcacagtctgatggcaaattattggttttgcttcctgcccttgatgtttctaaacatctagtccaaaattacttgtgaaaggtccagcaaagccaattttaaaagaggctatatggccaatcactattctttctacacattattgcaaataatcaggccacggctgggcacggtggctcatgcctgcaatcccagcactttgggaggctgaggcaggatcacctgaaatcaggagttcaagaccagcctaggcaacatgataaaaccctgtctctactaaaaatacaaaattagccaggcatggtggcatgcacctgtaatcccagctacttgggagactgagggaggagaatcacttgaacctgggaggcagagattgcagtgagctgagatcacaccactgcactccagcctgggcaatagagtgagactttgtctcaaataataataataataatcagaccaagtataatgaaattaaaatttattttgcaaataaattggtcctactacaatttatccttcatagaaatgtggaaactgaagataaaaaaaattaggtttcagaagaaaactatactacacctgttattagattctagccctaaacattgtttttgaggtttttattatttacctgcaatttggtctaaattctgaattatttcctgactacaagtatccaaggaataaatgggttttctttttctttatgatagttttagttggcttctaatgcaacaacaatttttattgtaatcctgtgtgcattctattcctactattcaaattattaatgttatagatctttcattgtagtacttctgaattaaccaaaatcacagtattctgaagatgattctacaaagcctgctgtttctacaaaggctgctgatgatttctacaaagcctgctgtagtgttgctgtggcctctgcttaaaaaagtagaaaacacattgatgcagcatgttcaccccaacctccctgcctaaaggctcagggaccatcttggaagaggaaggcgcgtgagattgtaagagccgaattagggggatggagtgtggagaataaggacacttcatcttggatgctcacctgccaaattgacttctgatgaaagccagctccagaaatgtgcctacagttactactttcacctaaaccctgcccttagtcaaatccttctcttcttctaagcaatcaacttcaattccttgtataacccacagtataaaagggcttttataccattctatcctattgcatgtaagccttgggtctgggaggtaacagtgtgggattccaccatctcatctccctgccacccaaacatgcctgctcttctttaagcaatattaaatgtttgtacttcagaaatttgatttgtcagcctcttcttcagactctcagcttctttggcctttgggagtaaatttgcataggcctgctcaaaacaggatgttctgggggtttgggggtgttgttttgttttgttttttgttttgtttagagacagggtctcactctgtcacccaggttggagtgcagtggtgcaatcatggcacactgcagcctcaaactcctaggctcaagcaatccccccaccttggcctcccaaagttctgggattacaagcataagccaccatgcccagccctggacttttctttaaagacatttacacagtgtaggaattactgtgggtgcactgctcaggtccccttctccaggatgctcattcctacctcatagatgattttcctgcagagatttgacctcagctgaagggcagtcacctggtccaggtggttgctattcacctccttcctgagaacagccaacagccagggacacgctagcacagagatataagagcgaccaaggtgaggccccttctgtgctgcggtgcatgctccagagcctccctgggatcagacttaagagggtctccagccagatctggtcttcgctgctttcctcgagctccccagcgcactcctgcaatgcatcttttttttttttttttttttttttgagacggagtttcactcttgttgcccaggctggaatgcaatggcgcaatctcagctcaccacaacctctgcctcgcgggttcaagtgattctccttcctcagcctcccaagtacctgggattacaggcatgcaccaccacgcccagctaattttgtatttttagtagaaacgggtttctccatgttggtcaggctggtttcgaactcctgacctcagttgatcctcctgcctcagccttccaaagtgctgggattacaggtgtgagccactgtgcctggcccaatgcacctcttgaatcacctcctcatgctttgcttttagagaacatgatccccaacatgtgattccagcaaagattctagaaagccaaccgtgacaatcacttctgggtttagatgacccccccccaccacaagatggcagtgagcacctcatcacagaggtgctgatggtctgcagcaccgcgccaggccagaacgtgccttttacagaagaaaataacccagtagctgactaggatggtgaggagggctggtgagcactgcggtagtgagagggacactagcatcactgagatgcaagtgatggtcatttttcataggtcaaagctcaaagcaggggacagttacagggcagggcttcatagcaccagtgtgatgaaagtatctgggagtggctaaggccagcactatgccatgggaagcaaggtgggcctgaggaggaggcagcagcgtcagcctgcaacaagtgggggctgccctgcagagacctaagagtcatgttatagagcacagtgtctgtaaggccaagaagtgtggacagccaagtgtgtcaattactagacatactcaagaggagcaggaagggcagggcatggtggctcatgcctgtaatcccagctacttgggagactgaggaaggagaatcgcttgaacccgggaggtgaaaattgcaatgagccgagatttcgccactgcactccagcctgtgtgatgggagcgggactccatctcaaaacaaaaaaagaaaaaggaaaaagaaaaaaagaaaaacctaggtatacttctcaagcaaataaaaataatcaaaaccaatatcatgcccgggcacaaatttcatatatataacagatttaaatatatgagggtgattatcctctcatatctccatttttttttgtttttccatttttttctttactaaaaaaagttaatgccaatgacacacaatttttttttttttttttttttttgagatggagtctcacttcttcgccctggctggagtgcaatggcgtgatctcgactcactgcaaagtctgcctcctgggttcaagcaattctcctgcctcagcctcccaagtagctgggaccacaggagtgagccaccacacccagctaatttttgtatttttaatagagacggggtttcaccatattggccaggctggtctcaaactcctgatctcaaataatctgcccgcctcggcctcccaagattctgggattataggcgttgagccactgcgccccgcctatgtatgattttttttttaattttattttcataagtttttggggaacaggtggtattttgttacatgagtaatttctttagttgtgatttgtgagattttggttcacccatcaactgagaagtatacactgaacccaatttgtggtcttttatccctcacccccttcccaccctttcccccggagtccctgaagtccattgtatcattcttatgcctttgcatcttcatagcttagctcttgaacccttactttctgtttgagggagaagacatatcatctacaagtagatactgtgtaaacattccattgcatgactatcccataacttatttattatttgtgtttggttatttgctgctatgtaacaaccccactcccaactaaatggtgtgacaattccatgattctgtggatcaaaaattctgaaaagtcaaacccaaggagttttgtctctgctccatgatgctaaagcctccgcaggggtgaggcgaatggctcagggtgactgaaaagctcagggttggaacagctggggatgaggcctctatgtataagatgattcttcactcacaggtctgaaactatggtggggacagccagaaggctcggctcagctgggacagtcacctgagccctacacatgacctctccaacatggtgatcctgaagcagttgggtttcttacacagcatcacacttttcttttttttttttttttttgagatgaaatattgctctatcacccaggctggagtgcagtggcacgatctcagctcactgcagcctccgcctaccaggttcaagcgattctcctgctccagcctcccaagttgctgggattgcaggcgcctgccaccaagcccagctaatttttgtatttttagtagagacggggtttcaccttgttggccaggctagtcttgacctcttgacctcaggcgatccgcctgcctcggcctcccaaagtgctgggattacaggcatgagccaccgcgcccggccaaagctcacacttcttatgattcagccttagatgtcacatcagttcattttccccacacttattagtgttagaagtcacaagcccacccatactcaggggactggcacacagaccccactctcaatggaaggggtgggacaccaccattcctgctgatgggcatttgggtaacttcctgtttgaagctattaagattgggctgctgtggccgggcgcagtggctcacgcctctaatcccagcactttgggaggccgaggcgggcggatcacgaagtcaggagatcgagaccatcctggctaacacggtgaaaccccgtctttactaaaaataccaaaaaaaaaaaaaattagctgggcatggtagcgggcgcctgtagtcccagctactcgggaggctgaggcaggagaacggcgtgaacccgggaggcggagcttgcagtgagccgagattgtgccactgcactccagcctaggcgacagagcaagactccgtctccaaaaaaaaaaaaaaagattgggctgctgtgactattctagtaggtgtctttggtgagcgcctacacgtgtttctctttttctctttagtatatgcccaggaggggaactgctggctcccagataccgtatgttcagggtcacacacacttccacagggttttccaaagcccttgtaccagcacgcactcccagcacctgtgtgactgctccagctgtcccacagtctcatcagttctattgctgatattttcattttagcttaagttatatttaataggaaaattaccgttgcctctgccccccgttcctgcctgtaggagtttctcgtagctgttgctacaggtggccacaaatctgtcacttaaacccacacaaattgatgtccttatggctttggagtcagaagtgtcaactgaaggtactagcagggctgtactgacctggtggcctcagggagcatctgtgctgcttctccaccttctagaggctgctgcatccctcgctccagccccttcctgacaccactcaccctcctacttctgttatcacatcctcaccttctctgtgttcagggctccctctgtctctctcttgcaagcacacttgggattccattgagggccacccacataacccaggagaatttctccacctcaatatccttaacaactgcagagcccttttgccataaaagttaccattcacgggttccagggattgtgacatgggtagctttaggagtgattattcctgcctgtctcccgctcaccagaacttggactttctctctcaacaggagccccctgtgtgggaatagcctgtctcaacgacgccctctataaggacctgcttcctcaaaggacctcatagtcgggtcctgcccctcagtgtccagtctgccttggctggaggggctgcaggggtgtgttggcgccacctggtggagacagggcatcacagcaggtgggagcccagtagaagcacaaccaaaacatgggtaatgtttaaaattttctggctaagcgctgtggctcacgcctgtaattccagcactttgggaggccgaggtgggtggatcacatgaggacgggagtttgagaccagcctggccaacatggtgaaacatcccctctactaaaaaatacagaaaaattagctggacatgtggcgcgctcctgtaatcccagctactcgagaggctgagacacgagaatcgcttcaaccccggaggggttgccgagatcgcgccactgcactccaggctgggcgatagagcgagactctgtctcaaaaaaaaaaaaagaagaggggaggcgaggggaggggaggggaaaagggggaatttgtttggagctgagacatccatcttctcctgacctcagatatttgcactcctggttatgaagccttcacacttggactgaatacaccaccagctttcccgatttccagcgtgcaaatggcagatcgtgagacttctcagcttccataattacatgagccaatttatatatataaattgggtcctccagaaaaacagaataaattatatatataattatacgcataacttaattaaattatacgtataacttagctatatatataatttattctgtttttctgaagaaccctactgacacaaatgttgagcatcttttcatgtgcttattggcttaataacttgtacatcttctttggggaaatgtctattcaagttctttgcccattttgtaactgaactattaatatttgtctttacattgttgagttgtaaaagttccttatatattctagatactagagccttatcagatatatttctgcaactattttctcctaatatataggttgtgtttttattttctttttctttttttttttattgagacagtctcactctgtcacccaggctggagtgcagtggcatgatcttggctcactgcagactcgacctgccaggctcaagcaattctcccacttcagcctcctgagtagctgaggttataggcacttgccatcgcacccagctaatttttgtattttttagtagagccgaggtttcgccatgttgcctaggttggtcttgaactccctgcctcaaagcgatctgtcagcctcagtctccctaagtgctggaagtacaggtgtgagccacagtgcccggccatctattttcaatagtgttttttgatgtacacaggtttggaattttgataatgttcaattcatccatttttttttttttttttttggttctttctactggaccaccactcttgagccctctaatccaacctccacgcggcagccagagggagctctctaaatgtaattactctttccctgctccacctgctcaaaacagtgtcacatttgtgatttaaaacagtatttctcaaacctaatttgcaaacaaagcaggtggaactcttcttgtatgcacagcatctgatttggttggtctggcatgggtctgggagtgagcacacctaccaagcggctgctggggtaacttgcgttttccactgatgatttcagcaatgtttccggtcccacatgctcctccagaaccttgtactcccccatgaaaaggtggagtccatttccccttcctttatttatttttttgagacgaagtttcactcttgttgcccaggctggagcgcaatggcgtgatctcagctcaccgcaacctccgcctcctgggttcaagcaatgcttctacctcagcctcccgagtagctgggattacaggtatgtgccaccacgcccagctaattttgtatttttagtagagacggggtttctccatgtcggccaggctggtctcaaactcccgacctcaggtgatccgcccgcctcagcctcccaaagtgctgggattacaggcgggagccaccgcgcccggctatttccccttcctttgaacctgatcaggacttgacgatggcatcaacatggtgagagtgaccctgcatggcttatgaggctgggttacacaaggcgatgttgcttctgactggctccctctcaggatacatgcccttggaacccatcctctaagctccttgggagcccaacttagcccatgtggagacaagacagggagagaaacagaggcacccccagccctcagccagcatcaaccgccagacaggagagcaaatgcgccaacaatgattccagctgaagcctcagacagcgtggagcagagatgagggatccctgcagattgcagatgcgtgagcaaaatgcatgctgtcactgttttgaaacaacaatgtctgggggctgtttgttatgcagcaatagacagctgtaacaatgctgttactgctgtattccatgaatgactgcactttgagtagcagggggctagatcactagataagccccatggcttctgtgtatgctatttttctacttttatatccttttcattcactttttttttttttttttttgagacagagtctcactctgttgcccaggtgggagtgcagtggtgcaatcttggcggactgcaacctccacttcccgggttcaagcaattattgtgcctcagcctcctgagtagctgcgactatagatgcacccccatgcctggctagtttccgtatttttagtagagacggggttttgccatgttggccaggctgatctcagactcctgacctcaggtgatccacccaccttggcctcccaaagtgctgggattacaggcgtgaaccactgcacccagcctcattcactttctttacttggctcatttttccttgttgcctcaattctcctctaagatcactttcctgacatttcagcctgggcctgttgccttctctgggtcccctccgcctcctgtgcctcccccatctcagccttgatccctcagattatacttcctctgtccccaccctgaccatcttggctgtccctggatagggatgggtatcttctcccactggtctgggagatctggaaggacaggcctggaaaagacttggtcactgctggaaggagctcagttagtgtggtgctgaggacagtacgggtgaggctggccccttcacccaaactcccactctcttccatagatttcacctctgtggcccaggccataggattagggcaactccccttaaacatcgagtccatcctccaagctgtccttttttttttttttttttttttttttgagacagagtctcgctctgttgcccaggctggagtgcagtggcgcgatctcggctcactgcaagctccacctccagggttcactccattctcctgcctcagcctcccgagtagctgggactacaggagcctgccaccacacccggctaattttttgtatttttagttgagacggggtttcaccgtgttagtcaggatggtctcgatctcctgacctcgtgatccgcccgcctcggcctcccaaagtgctgggattacaggcgtgagccatcgcgcccggcctcatgctgttcttgaatagtgagcacctgttacaagtcgccccaccagcctctcacttgtacccccctcatctctttctccccaagagacagaggaccctggcacttgtgaagcatgacccagaccctggggccatggcatccaacatcctcattccccatgacccctactgtctagatgtagctgccaagagacccccagactccccgggcctctgtctagagtgccaagacagagagagaatgccctgccgcttgcatgctttgtggggtgtccttcccccttccctggctgctaggcgtgacttcaacgttctccccaacccccaaacagcagcactgacaccagctgcagacctggctcaggttagctaatgaggaccaggctggggatggagcctgaacccctaaaccccagtcctgtaccccaccctaatcctggggtctccactggacaaaacgaagcagcttggtttttcgttgttattgtttttgagatagagtatctctctgtctcccaggttggagtgcagtggcgtgatctcagctcactgcagcctccgcctcccgggttcaagtgattcttgtgccgcagcctccccagtagctgggattacaggcgcgtgccaccacacccagctaatttttgtatttttagtagagacagggtttcaccatgttggccaggctggtctgaaactcctgacctcaagtgatttcccagcctcggcctcccaaagtggaagcggcttatttttaaggagaaaactcccgtggaaaggaatcagcacctcctctgtcaacatttcacttctctgaaaagactctcacttccaacagaaagtgctttgtaacacaacaatgaggctgggcgaggtggctcatgcctgtaatcccagcactttgggaagctgaggcgagtggatcacgaggtcagaagttcgagaccagcctgaccaatatggtgaaaccccgtctctactaaaaatacaaaaattagttccgtgtggtggcgtgagcctgtaatcccagctactcaggaggctgaggcaggagaatggcttgaacccaggagatggaggttgcaatgagccgagatcacgccactgcactccagcctgggcaacagagtgagactccgtctcaaaaaaaaaaaaaaaagaatgagaacatatggacacagggaggggaacaatacacacaaacaaaatttagaaacaggtgaaaataattttagtaatatttttactaatactgatatgctcaaaatattattatttcaataagtaatctaaaaattattgagatgtcttatgttcttttcatcatactaagcctttaatatttggtgtgtattttacactcacagcacatctcaatttgcagtccccatgtttcaagcactaaataaccatgtgtgtccggtggctaccatactggacagcgttgatctgaaatcgcatctgtatgcatcaccagcatatttgcagagatccccatctcagcagcacacctgaggctcatctgcgaaagcacctgcaacttctctacaacctcccacatcacctccaaacacatcctcatgtcatctgcaaacacacccatagctcacaggccaatgcctaaatatcattgcaggcaccttcagagaaagcacttactaaaggggtatacttgattccacatctgctttgacctgcaaatctcccttctcctttacatacatttgcatctcatttgtatgtcaatctaaatccactggcagagcctcagatcatcatctcaaagtcaggtggatgtggggctgggcaggcctccaggtgttcctcctcctgcttcctctggggctcttgatcctcctcctcttccttgctgctctcctcctcctcctccaatatggtgaccagttcctcccgcagcgcccccatctccagccccaggctgcacagctgtcccagcagctggacatccactcggcgcaggttcccctgccagtaggaaggggacgtcacagggatgccaccccagagagcaaggggtctctccaggacctgggtgagagcaggtcccaactcatgtcctggccacagcgcctgggcagggtcctcactgtgcccatggaccctaactgccttcctgcttctcagagtgtctcttgatctctaactcttctctttgtctctccatttcattgtccctgacttctctctctctgtctcctccctctcttatctatatctgtccctgtttccctttgtctctgtccccatttattttttgtctttccatgcccctgtctctctgtctttatgtgttgccatttctctgcccctgcctttggctctctttctctcgcttgccctctctctgccctccccaactttctcaaattcagtctgtctctccatctctgttcctgctctccgtctctgcttcccacctctgtccctctcttttgggatctccctgtccccacctctgttcccgtccctcactctatgtctgtctctcggtgtctgtacatgcctctcatgtctctgcttctatctctcagattctgtttttcgatctctggccttctctatttttgttcatttccattcattctcatttcctctctttctctttcccttccaaacccctcactcaccagctcctccctgatccacagcagactatcgcaggcacctccagtgtctgcccctgcagtcctgagggtctgaccagggatttccactggggagacctccctcagggcctgggggggtgggcccagccccggaggcaccagtccagcctgattcagctgcctccacagttccatcgtctctgagctatggctgcaaggagcaggaagtagcaaggtccagggtggcctggtcccctggggagctgtgtgcgtggtggagagtaaagggcagagggagtgggatgggggttcctgggaaaggtatcccaaagtccactcttcagagagaatcagctggccttgtgcttttctttttccttctgaagtctaacctcaactctgctcacagggttcaaacatagcctcttgcagaggtctaactccacccttccctgcctgtctcaggcctgacccctcaggggcgctcagtgtctgtagatgcctggcaccctctgtccttccacctgccccccaccaccacttctccagcctctcctcagcctccatttgacctctggcttgcccatagcttggtccttgcttgtcctcttggcacgggtcatcctagggctttcccaccagtgtgcctttgggggcaggaatggctcccaggggcaccaagacagcaatcccttagctggagtgcctgtgtccaggctgctggcctagggccaagcagccaattctgctgaccctggacttgcctatgggtatattatccctgttgagggtgagggcttctgctgtggaaaagtctgggaagcactgcaggcctctctcggccttggacccttccttcagacccaaggtgcatatatatacatatatataatggtagatcacgaggtcaggagatcaagaccatcctggccacatggtgaaaccccgtctctagtaaaacacaaaaaattagccgggcatgctgccgcgtgcctgtagtcccagctactcgggaggctgaggcaggagaatggtgtgaacccaggaggtggaggttgcagtaagccaagatcacgccactgcattccagcctggcgacagagcaagactccatcttaaaataaacaaatgaacaatatatatatatatgtattttgttttttgagacagagtctcgctctgtcatccaggctggactgcagtggtgcaatcttggctcactgcaacctccgcctcccgggttcaagcgattcccctgcctcagcctcctgaacagctggggttacaggtgcacgccaccacacctggcgaatttttgtatgtttagtggagacggggtttcaccatgttagccaggctggtctcaaacccctgacctcaggtgatctgcccacctcggcctcccaaagtgctgggattacaggcgtgagccaacgcgcccagccccaagtcccttttaccatagaaagtaacatagtcacagtgcccagggattcacaggtatggggagagggttcgttattcagctgccacacccaccttcctaaacctgctgcccttccagtttcctcacgtgcacagccacgcccgtctgcttttagtttctcaatctgttggcttaaccttcaaaacaggcccaggatttgagcacttctcaccattccctctgccccatccccattcatctcttgcctagactgctacagcagcctcttttactggtcccctgcatccacccttgccctctaaggcaagggtccccagtccctgggccaaggaccagtaccagcccctcgcctgctaggaactgggccgcacagcaagagatgagcagcgggtaagtgagcattaccgcctgagctccgcctcctgtcacatcagcagtggcattagattctcataggaggcaaaccctattgtgaactgtgcgtgcgggggatctaggttgcctgctccttatgagaatctaatgcctgatgatctcaggtggaacagtttcatcccaaaaccatccccaccccacccccgacccccagtctatggaaaaattgtcctccacgaaaccagtccctggtaacaaaacggttagggaccgctgctctaaggtacattctccacctggcagaaataatctttacaaaatgtaaatccgattttgacactcccttcttcccactgtgaatagaataaaaccctaccaggcctgcaccgtcagcccctgcccacctctcaacccagtctcctatctctgtctgcaagctggttcccacctcaaggcctctctgctctagaggctacctctccctgcagcgcttttcccctagatctttgaatggctctttccttatcattcacttctacttcaatgtcacctcttcagagaggcctttgctgatggccctacacccagtcacttttttttatctgcttctcatcaaaattgccttgctgattcctttgtttcttattcatcctctcccacatccatcctctcccagcccagaatgttgacttcctgagagagggactgggtctgtcctgctcaccatggtaacctcggcatctagaacagtgcctgccatcacgtggtaggtgctcagtaaatattcttggaactaatgaatgaataattctatccacaagacttcacaatggctcttcatgctgcgatctagctttcaactccaaactggtcttgagatctcacctcagtctctaaccttgacatctaacctcttcacccactctcttacctgaccctaatttttaaaaatgacgtggtcagcttttcagccccctcattccctgtttttaggaggtagtgagtggaagctggaagaataagaaagcttggggagactgcaattgcagtcaggaaagaaaggtactctgccgggaagaacaccccatcttctcctagggaaagattgtggagtcctggggtttgttttgtttttcaattttttgttttaagagacagcgtctcgctctgtcacccaggctggagtgcagtggcgcaatcacagctcactgcaacttcgacctccccggctcaagtgatccccccgcctcagcctcgtgagtagctgggaccacaggcgtgcaccaccacgcccggctaacattttattttttgtggatataaggttgccctatttctttgtggagataaaggctcccctatgttgcccaggctggtctcgaactcctggcttcaagcgatgctttcgcctcggcctccacaaagtgctgggttcacaggtgcgtgagcccgacctgtgtctcgttttgaagctcagggagagggcgctgtgagcaatccctaaaccctttaagagtaaaaagtgcgtgcacctttaagaggacggttagaaaacgcggggcgtggccacaggagaataagttcgcgctgaaccaggagcgtgggataagaccggccccttccggttacgaaaccttagcaagatggcggctccctgggcgtccctgcgcctggtcgcccccatgtggaatgggcgtatcaggggcatccatcgcctgggtgcggcagtggccccagagggcaatcagaagaagaaaaggacaatactccagttcctgaccaactatttctacgatgtggaggctctgagggattacttgctccaaagggagatgtacaaggtgcatgagaaaaatcgatcttacacctggctggagaagcaacatggtccatacggcgcaggtgcctttttcatcctgaagcagggaggcgcagtcaagtttcgagacaaggagtggatcaggccagataagtatggccatttctctcaggagttctggaatttctgtgaagtgcctgtcgaagctgtggatgccggtgactgtgacatcaactacgagggcctggataacctccgaacctccgcaggctggacatctcggacctccctgccgtgtccaaccctggcctcactcagatattggtggaggagatgctgcccaattgcgaggttgtgggagtcgactgggctgagggcctgaagtcagggccggaggagcagcctcgggacacagccagccctgtccctgcctagcctttagccctgtccccactcacgtggcttctcagcgggctgcatggaatgtctggtagctcaccacacttctggcttccatttgtcttcactcaacgtcagggtgggggagtggtgctggccaatcacaggagagagcgtgagttcccagtatttattcctggctgcccttggctaaaggtcacagctcctgtcaccctgtcaggcagccctttccatgcccctgttcaggcctggggaggtaaaggctcaggctgttagtagccgcagagagccacactcaccttgtcaggagactcttctcaaactgtccttatgtgagtgcactgccatttcttgcagggaccctgactgacacaggggctactactgacactttacagggatggttctcccccgtgcagggccgctgtgcccactgcaggacatgcagcatccttcgccccactccactcactaaaggccagcgcaccccaggccccatagtattgctggttatggatttattgactttatgttccaaattcagctttttcagttggctgttttttgaaaggggataagctttgtcagtagagggcaccgaacaggcattataggaggaaaggcgcctccttcgtggttcttgttggttgtgcttctgcctctggacgccgcagtgcatgtggcttccccagcacccagctcctgaagcaccaggcggtcagcagctgcccttggcaccctccagccctcagaagttgcgtaggagacacagcgcctccactgaggcacctctctgggaataacgttccccagcaccccaaatggatttccagtcaattcagaagcattttaccagtgaagccctcattattccagttcactgttaaagccagtaattctctatattaaactttccctgttcggtttatggagtataaaccgaacagggtcttgggaagggacagtgtctaagtgtctgggtgccatccagagcatttggcaggggcagctgcaggatgagtgtgttcccaggggagtgagagcagcagctatatggcacttgtttgctactgccctctttttttctttttgccaaacctgaggtgactagtgtcacaggtggagcccatctcaca

SEQ ID NO: 735310 - DNA, 188258 bp, Homo sapiens
ctccaaggctgagggatgaggagacctgctgaggacccagggccttatctttccatcccactccataggtcccagtattgactgatgctgtcttcacctcctagcctcacttttaaccttctggcacccgcccaccactgtccagttcactattgaagccctgccgtccagtgctgcagagggaaaggatgttcttctactggcctgcaatatttcagaaactattcaagcctattattggcacaaggggaaaacggcagaagggagccctctcattgctggttatataacagacattcaagcaaatatcccaggggccgcatacagtggtcgagagacagtataccccaatggatccctgctgttccaaaacatcaccctggaggacgcaggatcctacaccctacgaaccataaatgccagttacgactctgaccaagcaactggccagctccacgtacaccgtgagtgattcccccatacctctgggtgctggcggtcagttctgcttcacacacatgagattgtcaggcctgggctgtgcctgcatccccctctgcattttgtcccgtgttgagatttgggcatttagtgcaggacacacacatggtaggtaaacttcaacagatcagaattcctttcctgcatccaggccctgcagacactgatggcgggggcgggggggcctcagcagggggaggtcagtctcagccaagcaccccatgccctccccatgaacctgaccctgagaaagaccctggagaactgggtcagggcctggcctgagggcgtcctgggaacctcacaaaagcccagcctcaggactcctgactccgtgtgaccccgggaagcctgtgtcagggctggggtgtggtctcctgggcagggcttactgggagcaaggatttaccagatgtctgcgggctgtggttcctgaagcttctcatcagtgagggctcagctcccagagtctcatctagacaaggacagagcctaccactttccctgggactcagcctggagagggcagggggacaggattactagggcattggccccctgaatgaggagcttaagagatgcccttgggcagtcagtggcccaggggtaggaacagaggggagaaaatgttcctggcagcttcttgtccaccggggatcatgcccaggggtgctctcccatggaggcaaataacagatgctgttgatgtgaacacctcctctgtgccaagcttcatgtcagatcctgtgaataatttaaagttcattcacagacaaagtggcaagcctcagaccattttccatttacatattgtatggaggggaaactgaggcacagagagatacagacaccggccacggtgggcagatcgcagctggcagagtcacatgagggctgtctgcagctgctgccacgtcctctccttcatccctggtgccttactaggtgtctgtggaccttagaacagccactggttcggatgttttcttcttaggtgtctacagctcggagggggagattctggtctggagagttatgagtaaatacagaattaatcagttttttcttaactaaatcacctgcctcaacaatcagtcagtgctggggaagttcaggcctcctcgctcaggtccacaccccgcatctctggacatgaaatggcttcgtgtgttttctgatgtgtgggtatcattccaacaggaggataaaggggaggactttgctttctctccccattcacaccctgcaccagccagggcccagtgtgagacacatactccgtagttctctcatgaaggagggagggaatgaatgaaggaatgatctataacctcttcagagacagagacctggatacaagatcctaggaggttctgggcccaacgtgagacacacactctgtagttctcttatgaaggagggagggattgaatgtaggaatgatctataacctcttcagagacagagatgtggatacaagatcctaggaggttctggccacacctgttttctgtccctctagagcctaagacccatgtctcattcatctggcccgtttctcctaaatctgcccctgggagctgagtctcatctgaccctggggctgcagggctgtgggaaggttttcaggggagggatcaggcttgcgggtagtcccacacgtttgccttacaccctggagctctacctggttctcactatgaatatcccataataatcccccctatcctttctggggagtagaaaaaaagtaaatatttaaaaatatgccagagcatctgttcttcttagcaagttcagatagttattagttagcaggaataaatcgttattttaccagagcctcacctgctgggggtttatgggagcctaactgactgaggggggtgggaaatatccaactccagccccctctagccatcatgtcccacctaaaggagagaaaaaactgagaggcacttgtgacattcacagcccagggcacagactctatccaggaccacagaacccctccctccccccactcaccaccgcatcactgaacgcctgctcacccaagttcctgttgcccagtacatcatgtcctggctttcaacaaaaactacaagacagactagaggcaaaaaaaaaaaaaaaaaaaatgcagttcgaaagacagaacaagcatcagaaccagatgcagatgtggcagggatgtggcagggatgttgaaattatcagaccaggaatttaaaacaactctggggccaggagcggtggctcatgcctgtaatcccagcatttgggaggccgaggcaggcagatcacctgaggtcaggagttcgataccagcctggccaacatggcaaaaccccgtctctactaaaaatacaaaaaattaggcaggcatggtggtgggtgcctgtaatcctagatactcggaaggctgaggcaggagaattgcttgaacctgtgaagcggaggttgcggtgagcctagattgtgccactgcactccagcctgggcaacagagcgagattccatctctaaaacaaacaaacaaaaaacaatactggctaatatgctaaaggctgcaatggaaagcatagacaatgtgcagaacagacggatgctgtgagcagagagatggacaggctaagaaagaataacaacagctactatatctatctatctatctatctatctatctatctatctatctatctatctatatatatgtatatatatgctagagatcaaactcactgtaacacctggatctcagagtggttgtgaggatgtttattaggagattaaagagattaaagcagagttatacacagggcgagagctcaactgatgctatcaactagtattcttatttttttgatgttgttattggcaataaaatcaggaacaatgcagtaaaaatttggttttatcatgtacgagttctgtgaccttccttgacttactgaggtactgtaagtctcagattctaactctgcagatggcggtgatgcccctctccctcaaggtgatgtgaggatgagatgagctgtaggtaggttggtgcccactgtgcctggcacatggaaggcccctgaaaatagtcaatgaacatcatccccgctcatcagcatggagttgacagtgagggctcgctctctgtgacaatcatggaatggaaaagaagaaacaagaggaagactgggcgcagtggctcatgcctgtaatcccagcactttgggaggccgaggcgggcagatcatctgaggtcaggagttcaagaccagcctggacaacatggcgaaatttcatctctactaaaaatataaaaattagcctggcatggtggcacaaacctgtaatcccagctacttgggaggctgaggcaagagaatcgcttgaacttgggagatggaggttgcagtgagccgagattgcgtcagtgcactccagtctgggtgacagagcaagactccatccaaaaaaaaaagaaaaagaaaaaagcaacagagggaagaggtgtgacatgagaggaagaagggatttaaaggtacaggagcagggcgaggtgcaagcacctgtgggagaatgtaggagttggtacatcccagtgtgtcaagtctgagacacagaaaatggtgcaaccgtggagagcaagggagtcagctatgaggacagcccaacagaccacactcaggctctggagcatttccttcctccctgactatgcccctgccctgcaatgccccttatggtttcccttggaacaaacttgggccttgtcccctttgccttcccctttctgcagaaaacaacgtcccaggccttcctgtgggggccgtcgctggcatcgtgactggggtcctggttggggtggctctggtggccgccctggtgtgttttctgcttctctccaggactggaaggtaccgcagcttttccccagcctcctcccacccctaggctgaccccagtcagggaggagggagaccccgccctgtattcagggccaggctttccgcatcctcccaaggaatccttccctctcattccatggctcctcccttgccagctgctgatcctaggctgcctcttcctttatgaatgtggcacagttaaggttgcacccctgagtgctgtcctagttccctaacacagcaaagccacagctgcctggagggaggaagggagggagggagggagggagataagacgggagtgctcagaacctggtaccttctgctgttcattgaatttacccacccagtgaggagggatttgcaggcttgagatccatggtgggggtcctgggcatggtcacgcagtggggagtggcaaagcctggacaggctgggtagggtcagcaccccatcgtgattgatgtccctgaggtgtgagatgggagaacctggacctcaggacctgctgtcctttatgtctcttgccaaggggtggagagagagaggacaaggccattgccccatttcagcatctccaggcctgaaaggagggtctggccatggcagggatactgagttctgggagaatatgatacatgctccttgcctccccatgcccccagctcccccagtgtcctgcacacacagccggccctgctttccctctggggccttgacccttcctctcaggcaaacgcaggtggtctgattccctccctgagtcctcagtccctttcctgggtccctgggtcaatgttctcctcacccggcatctgcctgggggggtccttcctctctggccaggacagacgtgactgcttaaggcctatcctcagctccccgtcctcggccgctcctaccacgaaactgatggagacaggaggccttcactccagtccttgaaaatggagtcccttccttgtcctttattctgcccctaaacctgtgatttctccctgcaccctcatgaataatcctgacctttcctagggccagcatccagcgtgacctcagggagcagccgcccccagcctccacccctggtgagtgtcccttcagcccaggtgtgggagcccctaggcctgccctacggtgtccactcctgccagtcaccccctgggggcctctgaccctttctttggggctgcaaggaggatgtcaggaaacatgacacaggggaccccgactgtcttgttcagactgatctgtgggctctgggtcgtgggtcacctcctcgacctcagctgctcaggtctcccctgggaagaggctccctctccctgattctctgggagctgaggacccctacactctcctgcaggaggggcccaggctctcctcccaccctgctgctcactcctgtctctgtccccaggccatggtccctctcacagatccaccttctcggtaagcctgttccctccccagcccttttctactggggtcccaacagtgcaggctcagggcagggggaccatcaaccccacagcacagcactgacccacctttccccagaacagtcaggtcaaagtgagtgcctccagccaggatccgggcctctctacagggccaggaccacccacgccatgtgctgacccctccccgggaccctctacacctgaggagaaccctggagtccagcaggtgcagaatggacactgggaccatcagtcagaggcccacattaacaagggtgcggggtgggcccagccaggacaggggtcagggtgttgtgtccacactgggaggctgagctcaggggcagagctggtcaatcctgaggggaaatgagtggaagtggaggcagggaagtaagtcctggccgatcagagacaggaaccttccaggctgggcttccgtgaccctccctccctgtcccctgacatctcctctctcccctgcccaggcccctctacccagccccagaacagccactcccatctatgaggtgagtgtgggccatggatgttctggtcccgcaggctccaggggacccaggatctgcccccaccagcacctggctgagctcagattcaggaaaatgcagtgaaaatgagaacaggtggtggtgagcagaggagggaggggcctgggaacagggaccccctgagcacagccaggttcagccccagagaagccctgggtgggcccagagcctgggagatgccagacactgttctgagaaggctacaggggttgaggcctcttctctgtttttacaggaattgctatactctgatgcaaacatttactgccagatcgaccacaaagcagatgtggtctcttaggttcctctgggagctgctcttgtgggttgatggagcgtccccaaagctcccagccctggggacggggaaggacatggagcctgagccagagaaccagctctgagtcctgaggagacacaggcctggggacagggagggatgggagtccctgctgaatatctggagaccctgacaggttgccctgggctctgggtgggccgggacaaaggcctctcatcaccacaggaagcgggggcttgcaaggaaagtgaatgggcctgtggcccacccggggtcaccaggaaaggatctgaataaagaggacccttcctctcattggctctttttctgctcacgggaacttagcagaaactcacctgaaactccgtgtccattctctcccgggtcacacagggaaaatatctccaccttgtctcaaccacagtctctcttccctgggaggcagaaataggggttgggagtcaggctggggtgggccctacacaggaaagggcaagattcacatgagccctgcccagccagccgagcgctcagctgtcctcacactaccccagggaccaaggccatgcacagccccagcctgggtccctctgtgaatgcatgtggggtctcaggagcacagaagatggggccatctgatgtccacaaaaggtgagcaatgcgggagcaaccatgggtggtataggttgcggctgtggcccctacgcagcctccagtgtcctgacccctgctgccctcttcacccaggccctggaggcccagtctatcactgtcctccacaaatgaacttacctgtccccaaatccaggatcctgtgtgcttatacctggccactaggttctcctctgtcccagtggctactgctcaggacatctttatccctggtggggcacagagaggggctgtcagagcaaccaagattaatacagacgcataattcagtccttgagcactacccaggactctggcccctcattgctcatcagttcccactttaccccctggcatggatctcactgagcaagccaactctttacacaggagcatccaggtcagaggtgcaggactcccccatctaaagctcatgcaggctcccatggcgatgggacaacctgtctgctcctctccctggcccacagccctatctcgcctgcagctcctccacacacctgggacagcagttctcagcccttccctgagggcccctggaagggtgatgatctcatataggttcacttgaaccaggtgccaccttcccacaagtgagctggtgcctgcactaaagcacagagccacagttcccaagagtgttctgccactgccacaggtcccaagagtgttctgccactgccacaggttgttcgtcctgagatgagaggtaagaaaacaacccgcaatgggttgttttatatcgggatttgcatcaggatttagctctaaatgacccctgatcccacctgcacacagcgtcagatgagacaaggtgaggcctctttagttttctgttgaggctgtgacaaattaccacaagcttagtgacatagaaacctgaaccaaagtgcccacatggctgtgttctttctagaggctccagggaagagtgcatttcctctccttttccacctcctagaggcctcctgcaaccttggctgtgtcctctttctccatcttcaaagccagcagcacagcatcttgaaactattctgtgccctgcttccatccccacatctccacctcctcccacctccctctctcacttaaaaggaaggagccttgtggttattttggacgcacctgggataaaccacaacaacctccccatctcatgatccttcctttaatctgtaaagtgtcctttaccacgtgacatgtccacagatctggggatgaggatgtacacatctttgagaggcccttgttctgtccatcactcctctcaaggccatcttctcatcatcgttcactacaaactacacatgggcacctggatgggttcatcatgactgtggcgtcagttcctgcattaacatccccagcaccctccagatcctgagagagggagacggagggctctccatgcccctagtacctctccaccttcttcttggtgacatgcttagttgctaagaataacagaaagcggaggtgactgaaagatcacaactcaccggcccttcaatagttcgtggacatcagcaccacggacagtgactcagtgaggctaatttccaggtggcagcagggagcatgcagataggagggaactgcaggaaaagctgcccattctattctatatgagaaagagtgtaagaaagaggaagctattacagggataatgctattcttctctaatccataaattgcgaaacctttgcatgtctggatatcatggtttttagcacatctgctgccactccctgcagggctgattgctgcatccaggatgtggtctcttggggggctcacagcctgctttggcctcatggtgagtctccctgcccctgacactcaggccactgtctctgcctacaacatggtgggaaccttccatgattaacgtctgattctctgtgcctgacctttgaagcacatccatcactcagcctggagcatccgctgagctcagcatcctgctcctccatccccagctgagcccttgaggagatgcttgagaggatctcctgggctcctctgtgagctcctccaggctgagccttgtgcttggtgtcagaggcctttgccatctgcttgttctttccataggcaaataatcctcctcagggacaagtggggcctgaagatctgtctgaatatctatctatctatctatctatctatctatctatctatctatctatcatctatctatatgtatgtatatatgagaatgctttattaggcaaaactgcatactatgaacatgctttaaaatgcaacaggatgagatgtgaagacataaagaacaagtgtgtagtgacacatggctatcagaacacactgaagaatccacaccgcggccgagagcagtggctcacgcctgtagtcccagcacttttggaggctgaggcaggcagatcacttgaggacaggtgttcgagaccagcctgaccaacatggtgaaaccccatctctactaaaaatacaaaaaatttagccgggcctggtggctcatgcctgtagtcctggctgttcgggaggctgaggcaggagaattgcctgaacctgggagacacaagttgcagtgagctgagatcgcaccactgcactccagcctgggagatagagtgaggctccatctaaaaacaaaacaaaacaaaaagaatccacactgcttccccgcttcactttacccagaaaaggaatgttctaggccacttcctcttcagcacacatccccagggaactaaaataggttcacagtcacccccatcttcctcattcccatcacctcttacccacagaggcatctctggtcctacagatccagccctgccttcaagaggcacaggtccaacccatccagtgtccctgctagtcacacacagcactcagggtacaatggagggcttctgtgctttggatgggaacaaaccccacctcacattcccacacctgagaagccaccagggtcctctctgtcctgtcctcacactcaatgtctgtcctgggtcacccttgtcatctctcctggaaataggcatggctcctgacaggtaggattgaggctttgtcttttcaggagtccctcccactctgagcacatgaaactgctcagctccatgcaaccctctctcaccaggggccttgttctctgggtccctgaatacctgggtccatgccatgtacattttaagaaaaatgacagtgactctcaccctgacatcctcacccaaggcacgtgtctgacaagaatcaccaggtgagatacctgtggctccacacacctgaggcttcactgcgcaggggtgtcctcatccctctcctcccacccctagggacagtaagcaccacaggctgccttggaccaccagctccccctcccagacacagcctcagatctatactgacatgctacatggagaggctctgatgaacagcaggtattaggaaatcccaccgaaccaggtgccacttgcggccccactcctcctcatatctgtgactgggacagacacacataacacacctctgttcaccgcccagcccccaaggtcaatcacagtctgcttctcccctagatccactgctccccatgtcttccgtcctcagctgcatcctgggtggcctccttgctgttcttgtaccccagaggcaggttccaacctttgtgatgttgcctgcaatgcccaaactttcccttccccttccccttcccttttcccctcccccttcccctccccttcccctccccacccctatcccttcgtcttcccttgtcttcccttcccttccctataaagccaaacatacccatccacctaccttgtggtcaaagtcatcagcctcctgctccactcagtgttctctgaccctgcatatggaggtggtggcccctcctagaacacccaccactcactgtcagccttgcgtggtaatcacagattttgcaggggttacctgtgttcaggtgtgtcacctgtggaaccagaactcttggaaggactggcagagggagctgcttaggatatctcagggctcctggcatctggtctaccacagggctattaacaacagcacttagggacaaggtggaggatggacggttaagagggtaaatatggatgatgtgtgggcaaagaataggacacaggaacacatgcagtactcaaataattatgccaagaaaggtgaggacatggagatggacattcccatatacttctgatgggactgcagtttagtccctacagcaacattgacctcatcatgtttaacgcgcacacgctctgaccactatcctacttctgaaggcctccctgtgctgtgagctctgagaaggccaagcttgcctgttctgtctctgctaaagccagagaccagccaatagcccagcacagggtacttcataaatacatgttgaaggaatgagctccaggaacagtactccacatggtagagatgtgtgtatgaggatgttcactgcagaaggtcatgtcaatgtgacaagtgacgagcagcctcaaatccagcaacaggggtgtgggtaaaagatcatagtgtagccatgcaatggaaccaatgaaaaaaccacaattagagcaaatccacatgtattaataaaggaggtgccctccatacatgctgcacctaacagaatgttgccaaataagaatgaaaaatgatgatatttgggctgtaaaaactagaagtcagctaaataagaatgcatcgaaagtatttgtgaatgcttacaattttataatgccttggcatccgttttggatggaagttggactttctcataccagaagcagggctcagtcacctttgaaatagtttccagttctccacctccttccagttcctcagtgtgattgatcagatatctgatttatacaactgcctcctggtgacctcctccctatgggacttccggatacagcccgtatgactgccccactgaccccacaccctgcctgctgcagtgaccacctctaattacctggatctcatgtctgcttgcattaaatccaccaattaaaactccctgaggacaatctgtttgaataatattctgtaccctaataaaggccttgacccatgggttccccctctgtcctccccatactgcccctgacctctgtgtgtgtgtgtgggtgtgggtgtatgtgtgtgtgtgtgtgtgtgtcctccagacagggcctgtatcccccaggacctgtaagtaataaatctttattttcatcttatgtctctcgcaatcattggcaagagctctgcatcttaaagatcgcaaatttaagaaattggtgtagtcggcacaatagagtacctcttctgtttagcacaagatatctcggagctgctgaggcttttaacatcctcgccggtgtggctgcctcactggtgaggccgttctgttcagtgcaattcagttgctccactgtgtgctgctgtgttgctgctgtagagtgctgccatgttgttctccccaaattgttaccgagtaggaacctgtaatgtgctcccaaggtggtctaccccatgagaagggggattctccatctagggcaagggctaggtgtgtttctggaatcctaatagggaaggcatccacagagggtgaactccactcctccttagagtgaggagtgacatttcccatttattttccccatggaggtgccatgtattgactttttctttcactgtcccaaggttgagccaaggtgagctatggagaccagggcaagataccatttctgttagcaaagcaaatgggtgacaacgtgtggagaagctgtggttctcctgatggatatagcagagtgccatttagtaaaatcttgtcaggaggctgcccctggttagaccggcagtgtctgtagtcactaaggtggatgcgaattttaggccctgggccatggataatccctgcagacacagccgtggcttcatgtgatggggcaatcccgggctagtggctcccttgtttctgcatttcttgctgtggttgcacaatcaacacctcaggggttgattgggtcaccttggaaagagaaacagctgcctaggaggctggtgcacatggaggccaccctcaattttattctgctaacaagttgtaagattaaaacaacagggggctttgggtaccatcaggaacttgtcaagtaaacatccaaagacagaaagaagaaaaagaaaaagacattaaccgtctagaaatacaagccattttaaagattttgcttaaaagatgcgcttgggctgggagcggtggctcacacctgtaatcccagcactttgggaggccaaggtgggtggatcgactgaggtcaggagttcaagaccagcctgaccaacatggtgaaacctcgcctctactaaaaatacaaaaaattagcagggcatggtggcaggtgcctgtaatcccagctacttgggtggagaatcgcttgaacccgggaggcagagacggcagtgagccaagatcgcaccactgtactccagtctgggcgacagagtgagacttcatctcaaaaaaaaaaaaaaaaaaaaaaaaaagacgggcttgtttcgtcgttgtggagtcatcccagagagaggctactccctagagtcactgaccacctttcctcctccatcttttcctcttatcattctagagacagaaaacaagaatctcagctttaggtggctaacctcaccccccaagaaaagaaactaccactttgattgactacaaatccaagaaaaataaaagagaaactttaaaaagtactgagcaaaccacaggtctagcaaacataatgctagccctaggttacttattcatttacaacaaacccctagatataggaggaaaaaataaaaggtaattaaatatatacacatacaatattttaatataaatatataataaatagttaaattatgtatgtataatatgtaactaaatcaaagtaaaatttcatactttgattctattggaaattcaaaattcatttattaacttatatattaaggaatttatgtaaaaaaagatttttaaaagggcaccaatttgcttttgtgtctctacaacataggatctaatttaactttacatttgctaaatacactaattgacaaatattcatggatttaatcaatactggggctcaaattgtagccacacgtgggaatcccataaatttaaacactctgtccctattatcttgagaagaaaactaaatataaaattgaaaaaaacaggtatgtctcaatttacctgtaactttgcctaaatttcccggagtcatatacccattgctgtaaaacattctctattggacataggtgctctgagacaataaataaaatagaagtgtttttggtacttagacattggcttgacaaaatgggatcccatgaaacctcagttaagatagtgaatacggcccaatgtgagttgaaatggggcctttaaggattaaaacttattacatgaaacctagtaagtaatggggtgattatccatactgcttctccatttcatagcccaattttgacagttgtcaaatctggaaaaaacaaacaaacaaacaaaaaaacccctgggaatctgttgcctcacagagacacaaagtagacatcaaaattgtatatctcagttccagttccaaaatggtggcatagaagcaagctggctttactccttcacacagaaaaccaaaaacaaatatacagcaccaaaattattaccagatatattccagaactcaaatatgaaaatgaaacagttttcagagccacagagaagtgaaaaaaactcccgacagatgacaaaagaatcagatttccccatctgtaatgtccctccctgccccattctgcctggtaccaggtgtgtggaaaattttaccccaactcatggtttctacactgggaaatgtaagatcaatgcgggcaaccagtttctgcacaatcctgggttccctgtccctgccttaacccacaagaagcattgtgagtgcccgaagggagaaatttccctgaggacagtcaaagagtggggaggcaggactaccatctccttccctggaaactctgctgtgtaactcagccaagggagacatgaaatcagactggtgtttcagcagctccatgttgtagtaggtttgtttcacaggtatcctgggcatggacatctagccagctttcccacactgccaggatatcccctttgggacctccctcagttaggaagggcacactctgatcatttactagggccaaggtaaaccctaaaggtaacttagagatgaaaaggaggtagtgacctagcagtaaagaactctaagaaaatctatccaataaaaatcaaaacaagccagacaaagactaaaataaataatgaatccttcaatgtaaagacctggacttacatccacaagaaacagtaagcaggtaaccatgatctccccacatggacaaagtgaggaacaagtgactgatcctgatgagatggtgatgtgtgagctctctaatcaagaattcaaaactgcagttttaaggaaactcaatgatcttcaagaaaacatggaaaagcagttcagaaatttatcagagaaatttaacgaagggattgaaataatttaaagaaaacaaacaggaatcttggaattgagaaatatatttgctgaacaggaaaatttattagagtctctcaacagcagaatggatcagaggaaagaatcaacccaaataagactcccccaaggcataaaataatcgaattctcaaaagtcaagggcaaagagaagattttaaaacagaaagagaaaagaagcaaatggcataaagaagctccaattctgtggcaacagattttcagtggaaatcatacagaccaggagggagtgacatgacattctcaaaatgctgaaaaaatattgacatttgagaatactttatccagtgaagttatccttcaatataaaggagagagaaagtttcctagacaaacaaaagctgagataattcacaccatcagactagtcttcctgtaaatactaaagggtaaatactaaatacttcaatgtgaaagtaaaaaaaaaaacactaacatgcaaaacaaccacaacaacaataacaacatttgaaggtataaaatccactggtgaaattaagtacgtagacaaacccagaatactcaaatagtaattgtggaaagtaatccaatcataactctagcatgagtctcaaaatataaatctatcaaaaacaataatacattttaggaggccaaggttggcagattccttgaggtcaagagttcaagaccagcctggtcaaaatggtgaaaccccatctctaccaaaaaatacaaaaatttgcagggtatggtagcacatgcctgtcgtttcagctatttgggaggctgaggcaggagaattgcttgaacccaggaggtggaggttgcagtgagctgagattgcactactgcactccagcctgggtgacagagggagactctgtcttaaaaaaaaatagctacctgtttggagaaaggtaatataaaatatgtaaatagagacaaagtcaaaatttgcaaaggatgaaattaaagagtagagtttttttggggggttttctgtttctattattttatttgtgatctaagataagttgttaccttttcttctcttgaagatactttgttatatctatgtttttggaagtcttatggtaactgcaacgcaaaaaatctatgatagatccactgaaaataaaaaacaatgacttaaaacatactaccagagacaatcaaccacaaggaagacagtaaaaaatgaagaaaggaagaggggagttacaaaacaaccagaaaacaggcaacaaagtggcagtagtaagttcttacttaaaaatattgaacactgaatataaatggactctattctccaattaaaaggcatagagtggctgaatgctgcctatatgctgcctacaagaaaccacttcatgtaaaaagatacaaatagactgaaagtgaagggggtggaaaaagatatttcatgcaagtggaaaccaaaagagagcaggagtagctatactgatatgagataaactacaaatcaaagactataaaaagagacaaagaaagtcactatgtaatgataaagcgctcagttcagcaagaggagatgccaattataaatatctatgcatccaacacttgagctcccaagtctcccaagtatttaaagcaaacaatagtggatctaaaaggagagatagactgaatacaatattaattaggggactttaacaccctgctctcagcaatggccagatctttcagacagaaaatcaacaaggaaacttcaaagttaaactacacactagatcaaataggcctaactggcatttacgggacatttcactaactatctaactgttacagaattcacattattttcatcagcacatagaacattcttcagaacagaccacatcttaagtcccaaaaccagtcagaataaattcaaaaaagtttatatcacatcaagcatttgttctgaccacaatggaataaaactacaataaatgaataactttctggacacatacaacctaccaagatggaagcatgaaaaggcagaaaaacccaacaaaccaacatgaaactgtaacaaaaggaaaacccaggaccgaatgacttcactgctgaattctaccaaacatttaataagaactaaaaccaattctactcaaaatgctttaaaaaattgaagaggatggaacactttcaaactcattctacaaggtcagcattatcctgataccaaaaccagacaaggacaggacaaaaacaaacaaacaaacaaacaaacaaacaaacaaaaaaacactacaggattgcttgaggccaggagtttgagatcagcctgggcaacatagtcagaaccaatctcttaaaaaaaaaaaaaaagaaaaaaattagccaggcatggtggcatgtgcctttagtcctagctactcgggaggctgaggtgagaggaccaattgagcccaggaggttgaggccgcagtgagccatgtttgtgtcactgtactccagcctggggaacagagcaagatgctctctcaaaaacaaaaagcaagctgggtgtggtggctcctgcctgtaatcacagcactttggaaggctgaggtgggagaactgcttaagcccaggagttcaagaccagtctggacaacatagggggactccatctctcaaaaacaaccaaccaaaacaaagccaaaaaagaacataggccaacatcactaacaaacatagatgtaaaagtcctcaataaaatattaacaaaccatgtttagaaacacatcaaaagagatcattcactatgattaagtgagattcatcccagggatgccagtatggctcaacatatgcaaatcaataaatgtgatccatcacattaaagagaaccaagaacaaaaaccatataatcactccagcaagtgcagaaaaggcatttaataaaagaatgggttgagggagtggagcccatagtcagagcagcagtggtctgggattttggaagtagaaagaagggcagcaccactggccaggaccaccagggaacacccccataggccctgggtgttgtgctccagggagggttccctctggagttattaatcttggtgtccactttgcccagctgcccctcacagggtcagggaggatgaagggaaagcttccttctaatgaaagttcagggactcacagttcctagagcctgtagggagaggaagatcttcgaggaagagcacctgggcattggggcgtttgagaggaagatctatgccaggtccaagtggacaacctgtggactctctctccagggacatacgggtatctgggaatctcctgtagcttaaagaggtaaagacctctccctttagcctgaggactggaggatgctggttcaggtgaatgagtcctgcaggggctggtacaggcctggagggtggtggtgtccagggccttgggttcacccttagcatgattcaggccgggcggtgtttcacatgagcaagagggcctgggttcattgcttcaggacaatggtgaaatctcatggtggaagaaatcttgtccttgccagtgcccagctttcatttggtcttggcccagagtgtcctccctagagaagactcttgtcccttcttcacactgcccttcagggatatgccagccttatgggataagatggggtggagactgtagatgtgggtgggaatctctccacagagtgctccttctctcagcggttgcaccttgtctcagggcttcagcttgaaatctgggatctccaagcccttccctccccagtcctggccaggaccacatgggcagatgcattgtgtgaagtgcatttcatttggggtgtcctctctgcatggcaccctcccgttgattctctttgcgcatgtcagagtgcaggcaccatccacacctcctgctggaggagggacggagctgttgactcctgagagctgatcatgtgttcccaccctcacacacaatcatggtccatcctctgagggacatgtgttgccaccactgtggagatggtgcaactgacagtaacaaacagtaaaatctggtactgaatgggaccttaagccaacaatgacaatgtcattccaaggtgtttcatttttattgattcaatgcaagtcacctgatttcattgactattcacaatagctcgataaagtaaatgcatcatcaccaccactttaaagaggaaaaaggtgcttgggcagtttgtgactactgtggtggctgctgcattgctctctggtaaagccaagtaggtggtgggtgcggcctctgggctgggatgatccaccctcctggtggtggcaggggagccaagctggagccatggcctgtgcagtggtagcagctgaactgaccgctgctgcaggatttgcaagctgttacattttgcgaagccatgaagcacataaaacctcaagtagaacaagtgtttcaaagtctaccaaaatctgccttcagagattattactacagaggtggatatgaacccaaaatgacaaaacgggaagcagcattaatactagataatgaatgaacactagtaatagtagggtaagccctactgccaataaagaaaaaaataagagatgctcattaacatgttatgctcttaaatcacgcagacaaaagagggtctccttatatagtagccacaatcaatgaagctaaagatttactgcaagatcaagctaaaaacagtaggtgtataatgaatttttaacttcatattagtttatgtatatgaatatcaagtttttataataaaatgcctccaaacaaagaatatttgatttagggtttaataacttctaagaggggactcagatgtttcctgtttcacagtcagtctgagagggtcatttttcctggagctgacctgggtggaggcctcacactgatactccccagcatcctctctcctgatggggtttatgctgagcatacagtggccctgggacagctccattctctccatgagtcacagacgctggtcatggaagatccactggataaggttccagagtcatctgtggggcaggtcaggatcacaacatccttttcttctgtgactctggtgttgctgactcagatggggtcggagccactgaccctgtggacaatcagtggaggtgctcaactgaaagtgggctgagggcacgtcttctcctccatccctgggtccttaaggtaactgtggaccccagaccaactgacacaggagctagaaagaaattatttaggaagttagtgagggtaagagcgtccttggcaaggtttcccctttaacaaaaagcagcccaagataattccttttctaacaaagagcagcctgaaaaattgagctacagatgtagatgagcaagatggaagcttgcacaggtgaattccagtaggtgtgccaatagaaaagggctgcctggaagccaggtatgttcaacatggagactccatcctcccttttctccattaccacatgtacagtaaaaaaccaggcaacatggcaccggccaggtagacaatccatctgcatgacaaaagatcagagtggggcagccagcaaatggcacagctggtctaaacaatctttcaccccctgtataaatcagacactgcctcctgaagctcatctataaaaccttctgcatttcactatggaagtggcaacccattttccccaggacccctctctctgtgcagagagctcttctctttctttcccctatgaaacttccactcttaacttcactctgggtgcctgcatcctagttttccatggccatgggacaatgaacctcgagtattaccccagatgaatgatgctgtttcacaatcactggttcagctcccttcttcttagggtttcacagctcggtggggagaataccacgcctcagtggtctggggagtgaggaacaaatgaagaattaatcagattttacttagaacgctatcacctgcctcaaccatcagatccatgttgggaatgtccaggcctcctctcttagatctatacccacttcactggacctgaaatcctgtgtttcccgatgtgttggtgtcactcctatgagaggataaaggagagaactttgctttctctccccactcacaccctgcacaagacagggcccaatatgagacacacactcgctcagtagttctctcatgaaggagggagggagtgacctcgagtgattctgccatctgtagtctgtgtaccctggccagtggctgtatcttcatatgcctcagtttcccctcagtaaaataggacacacaatgagaactaaaaataaaattctaattccccagtgaactgaaaggatggcctcttggccaagcggatcccagagttcctgatcatgacaggatgggaggttacacctcattacagcccctccctttggaagtttagaggtgacaactgactagcattaacgctaaaatcgagatcatgagactgacagaacagactctctgtggccataagataccaaattataaactcaacctaaggtcatgcaggcaagggctaagccacactttcctacatttaaagaataagctatgttctaacacagaattttctttctctctagcggctaaagtaacactagccttcgagataagcaatattgaaatgatcgcggctcatccaccaacactggctaactgacccctgttccaacagccacaactacacttcaattggacaggagactgatttcagtaactttctcctaataagagaccactgagcatggcctggttctgctggtatacagacacggtgcactgagtaccataatgcttgtttcatcttttgatgtataagacctaatttaatacatttaaatctgaattctccaccccaaagtgaacatggggtgcatgtagcatgcatgtttgttgatcacgcatgtgcgtgtacttcctttgtgagtatccatagctccacctataacctgttgaatatgtatacctggccaactcattcagcataaatctatcttccacattcccctcccttgaagtgcctgctattggtctctgctggaggctgcatcttctaccctggggaatggccagcctgcaggctgtaaccctgtgtaagaaataacctggttgggtgcagtggctcacacctgtaatcccagtggtttgggaggttgaagtggtagaatagtttgagctcaggagccagagactagcctgggcagcatagcaagatcctgtctcttaaaaaaattttagggaggagagtgaggatcagaaaaaatacctattggctattatgcttagtacttggatcatgaaataatctgtataccaaacccctgattacatatataacaaacctgcatgcgtatctttgaacctaagataaaagtttgttttaaaaactatctgggtgcagtggtgcatgcctatagttccagctactcgagactgaggtgtgaggagtgcttgagctcgggggattgaggctgcagtgaattatggtcccacctgtgagtagccacttcactcaaacctgggagacagagcaagaaccggtctctaaaaaaaaataaaaatagaaaaataaaatgaaaaatatatgaaataaagtctcctttccaaacgtacagatctccgatttttctgccaacaatgataaatggtcagtggcttgccatgttgtctgtgaattacttttaaaatattcacgatcacctgacctaaaggttggtaccaaggaaccgcctgaatacaccgtctctgattatttgcctccaacagagtgttccctgggcctgatctctggtggacaatgagctgctgggaacatcctctcttctctattcctcccctggggatgctgaccttcccttggagtctcctaagttccccagggcagtcggctaatgtcctagggagcttacctgtcttctccataccaagtctcatgtgaaggacgaggctttgcccttgcccagatgaggctctgggggctgagccctggctggctaccagctgcaagagccatggcccttggacagctggtaaatccttgttcccagtcagccctgcccaagatgcctcaacccagccccggcacaggcttcccagggtcacatggagtcaggatcctgggacaggggactggacaggggtttccagggctgagtttctgaacaggggcttcccaggggtcccctcactccaggatctgacatggtcctacaaggaacgtccatggggaggggacccaggagggggaactgacactgacctccccttactgagcctccccccaaccccatcagactgtccttcctctgtagcaagtgcctgcagggtctggatgcaggaaagaaattctgatctgtggaagtttgtctcccctgtgtgtgtcttgcactaaatgtccaaacccccaaatgggatgtaatgtagagggggacacaggcacagcccaggcctgaaaatcctgtgtgtgtgaagcagaactgacccccaacacccagagctcatgagacatcactgtgtacgtgaaactggccagttacttcttcattcacaagatctgtttttatgacttgtagggtgtaggatcctgtgtcattgttggtgacattctgtatcagcagacatgtattggggtatattgtctctcagcctctgtggcaggtcctggggtaattacttgagttcctagtacatatcctgtaattcccctttgtaccagttgtagccaagcctaaggcagattgtgggtgagtggaagaatctccttgccttctgcagcttcaacagtgacttgggcagtggtaggcaagttccagaaagttaaaagtgaggctaggagtggggagagagcatcagttaatactgggccctatgcattgaggtggaaagatggggccctaggtcctggacaggtctcttcatccctcagccttggagtgtgtgtgtgtgtgtgtgtgtgtgtgtgtgtgtgtgtgtgcgcgcgcgcgcgtgcgtgcgtgtcctactgggccaaggtcagcagcatgacctcccttccttcagtgcctctgaccttggcatttccctgtttggagtccttttccccaggggtctgcctggctccctccctactgccttcaggtcctgctcacattagggcatccttgggagaccccttccctgacacctctagagaccctgggtcttccctttctgacctttcgctgctgtgttccctccagggctcttgtcaatacttgacctcacattctagatacccttgcatgtctgtcttcctccctatgagagcatgagctctgtgagaacagggacttgtgtgatcttggttgcaccccagtgcctgggacaggctgcggactcctgtggatgagctcatgagtgttcccagggcccttcacaacgtgggatttattttccaatggctgaggttgttggctaagagctctgttggagttcaatcaggctggtgggaaaaatattagagatagttatagagatagacacaaatcttcttggaagaccaaaaagtttgcataactttggtaatagatctgactgaaggtggtccctttacctttagttaaacaaattaaagtagtaacaaaggaaggcagagtagtttgtctagccagcttgtttactcatgtgatcttaagactaaccattgatgtgccacaggtgcttaattgctttctacttgggaagtccacaatgtcaattaccctctaacggtgttgactcaagcctttgttaattaatcttactgaataaatatgagtctcactagctgatcaaggccatggtcacaactgtttataggactcagcagggagtctgtaagcggccctgacagactcagctggactggcaaagcaaaatatgtgtgtgtcagtgtacactattcacccgtcccccacagctggtgcccctatatgaggagtgctgccacagagctctgtttagtgtcccttgttttttttcttgagtattaccccaacttaaattgtgattattgtcatctgttttcaacattaactgctcagtgatgattcacttggaaaacattaacaatcgagattgtttcttcactaacaacctcagattatttagattttcctgttgtaatcccttcttcctgtttagtgtccaacagaagccctctgtccctctcaggtccccgttctctccaagaaaccccagccagtctctgtgctccctcctcccatccactcccagggagccctcccctcacctgtgagcagaagcgcctgccagggatgtgcactctgtgaggaggggctgagggaggccccatgggctctgctgtctgctttgtcctcctctgtggagaggagcttgggcttcagaaaataaggaggccagaaagtaaggaacaggctgagaaataatggggatgtgtcgaaaggtcacagatgccaacatctttgtcctatgcaatattatccataaaattacaggtttgagatatgcttaaattttcttctaacatgcattaaaataaacatataacttttaatagttatattaaattgtatttaatataaattaaatgctcttgtcagagctactgtgactgtcagctctgctgtccttcctctctctgtgctaagcctcctcccagggcagaagcacttcccagggccaggggtgggggcggggaaaggtaagtggcaatgaggatctgcacaggtagcctttccgcctcctcccctctcagtcctgcctccttgtcttcttttcctctttttctccaatctacatttcagttccttagaccacgctgtgagaagcaaggcttattgggacccccatcccttaacaggatgacctgtgctccccataagtgacctctgctgtgtctagggattggctctgtcagcacctcacagagagtccctggggcccccaaactcagtgttattttctctatgacacagaaacccctctgggtatgcaaggttttcctcatgttttctaatgtctgggaaggttggatttactcccagcagggaggtcacagagatgtccagggagtggggtcctagaaatggacaaatctagagctaaagcccaggtctacgattttcagttgtttttttctgcagtgctatgtgaccctaatttcctaggagtaactaaaatgcaaacctcagacatttgtagacattttatgatttttctctacagcttgtaccactgttattattatttgctttatgctttttcctaaataaatttactttacaaaacatccttgtcctagtagggtgcaggggctcacgtctgtgatctcagctgcttgagaggttgaggtgggtggattgcttgaggacgggaatttgagacaaaacatctttgtcctatgcaatattatccataaaattacaggtttgagatatgcttaaattttcttctaacatgtattaaaataaacatataacttttaatcatcatattaaattgtatttaatataaatttatatacaatacatttttatataataaattatatatataaatgtatatataatagtttttcttttttgagatggagtctggctctgtctcccaggctggagtgcagtggcacgatctcagctcactgcagcctccgccttctgggttcaaacgattctcctacctcagcctcccgagtagctgggattacaggcgcctgccgccacgcccagctaatttttgtacttttttagtagagatggggtttcgccatgttggccaggctggtctcaaacacctgacttcaggtgatatgccgcctcggcctcccaaagtgctgggattacaggcatgagccaccatgcctggcctatatattttatataattatataaagttttctataataaattttatataataatatataaaatggatatttatttaagataaagttattagttttatatatttacatatatttaggaataaatgtgttactgtgggagcccagtgcccaggcaggtagtcagtacatgatggttgtcattagggttaatactttggaattctggattttttcccaagagagtgtctacgctggaatattgggcttgtggctttctgctgatgtgcatgtgtgaagaagctacttccacttattaggacttgtgtatctgtctcgcagtttcactacctattttctcgtgatgttggtcaagtcgcctaacttttctgtgcctcatttacctaatttgtagaatatgggtaacagtacacaagtgtgagtgtgtatttcccaggactgaccactagagggcgtgaaggcaccggcacttactattacagcaatgggtgtagtagtgctcatggtcgtaaacatcattctcccatgaaaggaaccagggcttcctgggagaaataactgattccagggctggggccggaaagcacaagcggagcctggagcatctcgtgaggccagaaagtaaggagccggctgaaaaataatggagatctgtcgaaaggtcacagatgccaaccagaaggagctttgaatgaccaattttgagacaaaatgagcactataagaaataatgatagtaataaattccaacccataaatacccatgagttcctactaatataaataaataattgaatacataaatatataaggatgaagaaacagctttttcttacagcagaattccaattaatgaatgtagaaggaatgatcaaatagaaaatcactatttggctaacagcacagtcaattgtttgtaggcaagaattatcaatggactttaaatatgaatgggtaaaagtatgatgatgctacaactagtgagtaccaagggggaaaaaaaagtacgttgagaagaaacaggctacttccatattcccaaagtatcacttcaggagctacttattgattataatgggacaaatagtaacttacagtagagaaacctggcaacagagtctctccgaggtacaaaggctctcttcaggaaggaggtaaggggaaggaagaagaaaacactgtcctgcctcaattatttgctttccccattctcaagtgtacttcatagacattcaaagatatgtgttgatagtgtccacgatccacatggctctattatagtcatttattcacacatacattcagtgaggctttgagtgcctaatgtgtgcctgatatttgctagatggtggatgctgagaagatcaggtgtgctgctgtctctagggtgactgaatccacctgccccactttacagatgtggaaattaaagtgaaaaggatttataggattagttcactgtcacaaggtcactagccttaaagttacaggagtaaagcaagtttcctgacttgctagattttctgctgcaggtgctgacaatggtgagctccaataggagagaggacactcagagtgaagtgggagccctgaacaccctggattagccaagaggacatgccgggtccagctgtgaccgcacaaaggaccattggggatatttgtattctctttttcacttagagcttgaaatgaggaaaactaagtgcagaaaaccaagagtggaagatttttcacaaagcactggtaacatgcatcagaaaaccctgtgctgatgtctgtcacggtgtttctcactgaacggtaatagtctggctttgagtgtgttccctctacagcctggagttctgcgaggcagggaccaggtgtgattcatctttgtctctccagtgacagtacacagcaggctctgataaatatttcttacaaaataaaatggaataaaaagtagacatctgcacaggtgtgggatgactgagcagcagcagaagcaggaaaagtcagcgtccccagatcagctgatgtggtgttcggattctagataggggtgaggtgccaggatggggatgggggtcctgtggctctgctgccctgggggacacccctaggtttcacagtgcctgctgtggttgctgcactttgcttccccatgggaaagtgatcagagggtgtggggcttcaggtgaccccatgtgggaaatggccaagggaaggtggggtgggcggcacatggttttttttaaccaatatttgaaggtaggttgtatgaaaaggtgttaggcttatttcagcttatggggagtaggacagggattggtgagtgtgtatcaggtatattttggctcaggatggaaaagaactgtcacagtaacataaggtcttttgggaaattacatgtttactggcagagttcaggccagggctgggtgtctgaaaatacctgtcagggtcacttttatggttacaagggcagagcttggcttggaaccaggtttcttactaataccacatattaagtattataaaaactgtcctttgcaataggacattgctctatgatgcaggttgaggtccctctgtttaagtaattgtgggtggctgtgattctctcatctagtctgcgacttggacttcacctccatctgcagtccctctcctttgctgttgacactggtcagagttaagcgcatttactgacgatggtcacagggtggcagcactgcctctctggtattttctaaaacctcttcctggaactgagccagtctaagaggatgtcatgactaagaaaagggcactaatgaggtgaacagataattttttttttcttgtttctcctgtgaagtaacagagtggaggtgagcatggaataattgccttttagaaatggaagacaatggagagaagtgtttcgcaaaccttaatgtgttcacagatcccacacagatctttttattcaatacagattctgatttttctggtgaggcctgagattgtgcatgtctaaggagcttttggatgatgccattgctgctggttggcggaccacactttgagtagcaaggctcgaagatcatttagaggttaattctcactgcatctaatttatggatgaaaacaaaccaaggtccagagagagcatatacagcttgcctaacaaagccattccctaagtgcctgacttcttgcatttaaacccagggcttcagcctttgtccagttctcactccacacatcacacggtttgttcactgttgtgaacgacagttgtggcagcatctctttagtttaggaatccagagccccaatttcactaccctctttggtcttggctcatgctgtgacttcgaatagttttgcccttacttaaaatcttcagtggctcttttgtaatcacaagatcaagttcgaatatctctgtctagtgttcatggctttataacatatggtatctctttagtaaccttacctaacttccctgttttaaaattgtctcttgctgccatagccctccttgctccttcctgctccctaacaaactgtgttcacttctctctcagtggtagtgatgatggcatggcctctgatgttagactcatgtaacttctaatcccagatccaccaccaacattggcaagttgattcatctttctgaggataagcatcctcctctgaaataaacttagatggcggttgagaggggtaaataaaataacacacaaacccactctcatccctgagaccctcttcaaaactagcatataaaaatagctatttgaagaggttcagtgaaattcaaggtaacacagagaaggaattcagaatcctatcagataaatttaatagactgaaataatttttaaaaatcaggcagaaattctgtagctgaaaaattcaattgacaaaccgaagaatgcactaaatctttcaacagcagaattgatcaagcagaagaaagaatttgtgagcttgaagagataatatatgaaaactcagagtcagagagacaaaagaaaaaagaattaaaagaataatgcatgcctacaaggtttgattattaagctactcaaagagatacaagagaagggtgaaaaccaacataaagaaatgtaaaaaacaatcagaatataaatgaaaaattttctaaaatgctagctagtttttttttgagacaggctcttactctcatcacccatgctggagtgaagtggcacagtcatggctcactgcaggctcaacttcctgggctcagatgattctcccacattagccttccaagtagctaggactaaaggcgtgtgccaccaggccaggctaattttttgtatttttagtagagatggggttttgccatcttacccagggctggtcttgaactcctgggctcaagtgatccaggagattcactgccaaaaaggatataaccaagtcatatagtcataggttatctaaagtcaatgtgaaggcaagaattctaagagcagtgagacaaaagcatcaattaacttataaaggaaaacctatcagtctaacaccagatttctcatcagaaaccttacaaaccagaaggtattggggtcctaatcttttggcttcttaaacagaatagctctcagccaagaatcttgtgtagagtgaaattatatttcaaaatgaaagagagaaatacagtctttttcaggcaagcaaatgcttcaggatttgtcacggctagaccatcctacatggaatgttaaagggacttctaaatcacaaaacaaaagatttaaatagaacagaatagaacctcttgaaaccaaaaaattcaaatggcctataaaacaataacacaataagaaaacaaagtagataacgatcaacatgatgactggaacaaatattaacattgaatgtaaatgacctaacactccacttaaaagacacagattggcaagataaataaaaaatcacaaaccaaatatcagctgtcttcaagagactcacttaacatgtaaggattcttatagactcaaggtaaagagatgataaaagatattccatgcaaatggaaaccataagtgagaaggaatagctatccttatatcatataaaacagactttaagcaacaacagtaagaaaaagacaaataaggcaactatataatgataaaaggatcaatcaaacaagaagatattacaatcctaaatatatatgcacctaactttggagctcccacattcataaaacggttatgatgagacctaagaaaaaagatcaacacaaaacagtgagggtgtcctgggttttctttttattggacagcagtgtactagcctatcactttcccagtcaggggatttttggtctccccattcccctaccatgggttcatgccaaagtccatattttttattagtgtttggaattggattttttttttttgaggtggagtctcgctctgttgcctaggctggagtgtagtggcacgatctcggctcactaacctctgcctcctgggttcaagcaattcttctgcctcagcctcctgagtacctgggactacaggtgcatgccaccacacccagctaatttttgtatttttagtagaaacgagatttcaccatattgtccaggcttgtatagaactcctgacctcatgtgacagggaaacaggcactcagtgaacttcatgcgattgaggagttaatgataatgagagaagggctgtgaggggacagcactggggacaccagagcctgtgacgggctgagttgctgtgccttgggagatgcccttttgactgagccctgggaaggagggggtgtgggggcaggagctgcctgcagagggagtggcctcaggtgggcggccacctggctgcagggaagaggtgacagagttcgtgtgcagagcttggagggtgaggaggaggtgggttgaggtgaccttggtgagggtgaaccatggggggctgtgggccctgctgagggaggccagccagccctggacctacagggtggtttggtcttttttgtcccattcccagcatccactgagtggtgaaactctgcaggccagggaccatcccactggccagaaggagcgcacagtaggtgcccactcagtgcatgttgggctggacagaacctcactctgccccctgcccccagctttgggagctgcagcaaggtccctccccctagggatctccatgcctctgtctctgaggggtgagatggggagacttcaaagggccatctcagagtgtgggggatagagacgcagaagtgtgggggatagagggaggcctgggctctagacccaaaggaccttacacacctcctgagtcttttcaaatggtttcttctgttactttaaaaatgatgtaagtcatcatatttattgtaaatcccaggaatctaatcatgcgtaaaataaggtgtcttatccttgaccccaccccttccccaattaaatttccaggatgttaccactgtttgcagttggtgtgaatctctctttaataatactctgtttatctcacttgtcgttttacgccaaaatacccattgaattatattattgctgaagaccattcttttttttttttttttttttgagatggattcttgctctgttgcccaggctggagtgcaatggtgtgatctcggctcactgcaacctctgcctcctgggttcaagtgattctcctgcctcagcctcctgagtttctgggattacaggtgcacaccaccacacctggctaatttttgtatttttagtaaagacagggtttcaccatgttggtcaggctggtctcgaactcctgacctcatgatccaccctccttggcctcccaaaatgctgggattacaggcatgagccaccacacctgcccagaccattctgttctactgaatcatgtgtggtgggcacctcttatatcaatacatatggattttatcttgtgtttgttattggctcccctttttctcattgcatggctacactcaatgctttgtccacacccctgttcctgggttggaatcttgtgacagaaaatgaagtaacaaaggctaaagctttctaaagtggagtcaggagattgcaagacaattgcactttcaccagcaagagctcaaaccacagaatgttccaatagatttggataaacagctgaagtcagtattcaccagccttcaacatctcaactaggagaaccctaaaattaactaagcacatagaatggaatggacttgtgatttaggattccttctcagccaatgagctgcttctgaaaacaactttttgtggaaattacctgtaaagaaaaccctctcctgtgcttgtcttacagaacactagtcagggctgccctgattcagtggacccgaattgctattatttgtttcctaaacatatggtattttctgtgaccttcatctcaatcttttttttaagttactgggctgtttcccagttttcataatgacgagacattctgcagtgtttcatacacatgtcttttccccatgtggagtattgatccaggagctcattcagtcaacgcatgtttatgaagcatcctgtgccaggctgtgggctggtcactgtcttcagcagagagaggacaggcacagtcttgccttcacagagctcacagctcagggaggctcttagaagtgggatactggtcggagcatgtgcacattaaacatgatgaggtcaaggttgctatagggactaaaccacagtcccaccaagatcgcattgagttcctgtggtagaccagaggtcagggcccctaagatgtcctgagcagctccctctgctcagaagttttggttccacaggtgacacacctgagcacaggtgacccctgcagaacctgtgattaccacccaaagccaagagtgagtggtgggtgttctaggaggaaccgtcacctccatgggcagggttggggaagactgaggggagcaggtggctgatgactttggccagaaggtagggggatgggcaggtgtgcgctcatagggaagggaagagaagggagggcattgcaggcaacaacacaaaggttggaacctgccttcatggactgagaaaagcagggagtccacccaggctgcagctggggagggaagacatggggagcagtgggtctaggggagaagcagactgcgattgaccttggggactgggcagtgagcagaggtgtgttatgtgtgtctgtccccatcatagatatgaggaggggtgaggccgcgggtggcacctgggtcggtgggatttcatagtgcctgctgttccctagagcctctctgtatagagggtcagaatagatctgaggctgtggtctgggggaaggggctggtggtgcttaccatctctaggggtgggaggagagggatgaggatgcccctgagcagtgaagcctcaaggtgtgtggagccacagttgtctctcattagacatgtgttttgcgtgaggatgccagggcctggtggttattactgttgtcaagtttgcatgacaaggacccaggtatccagggatccagagcacagggcccctggtgaggggatgaggctcagatggggctgaccaggttcatgtggtcagagtgggagggactgatggagagacagagcctcaacccctcctgtcaggagctgtggctatgtccaggagagatgacaaggatgacccaggacattgagtgagtcattgagacattgaaggtgaggacagggcagagaggaccctggtgactgctgaaatgtaggatgtgaggagggctctgacccatgcaagttacaggacctccccacccccgagcccacagatgacccttaaattgggcatcctgagtgctgtgtgtgcccagcagggacactggataggctggacctgagtctctgtaagggcagcgctggtctgtaggaccagagtcttctctgtgggtgtgacgtgggcaggaattagcaagatgggggtgacaaggcttggcttggaggatctggtacagaagcccatgggcttggtcagctcagcttctcaggggctcagctggggctggaggagcaggatgctgtgctcagggcatgctccaggcagcgtgatgtgtgtggttccagggtcaggcacgggggtcaaaaattaaccatgaaaagttcccaccttctgtaggcagagaaaatggcctgattgtcagggtcagggagacttaccatgtggccaaagcaggctctcagcctcccagagaccacaccctgggtgcagcactcagctctgcagggtatggcaatagatgtgccaagaaccccaacatccagatgcatgcaaaaattttgcgatatataaaatagagcagatcaagtttccctgcaataacgttgttcctggttgtgtctttttcttgtaaactagacatggacatctttccagcagtctgttctcatctgccaccttcctgctgcagcacctcagaatgaacattcctgagacactgtccgtggtgctgacgaccaagagctatggaacagagtgtgatgtagaatcttctagttacctctgctctcctttcacttttaacaacagagcatcattaacaatgagaaggtggagaggtgttcaggatcttgaagtgacttctgtcttgctctcccataaccctgaagctgctgtagacattattgcagaaactgacaccacagtcaggatggccttgtccaggagcccatgtgcagtttgtagtgagcaaggatgagaaaatggtcttgaaaggggtgatggacagaacaggggcttttcaaaaatgtcacatcatcacccccagcatccgtgaatctgtcacatggtaagagaccttacagattaaatgaaggattatgagtttggaagattattgtagtttatccagatgggtccaacataatcacagaatcccttccttacaaatgagagagggaggtgggagagtcagagaaggaggaggagatgtggggatagatgcagaagacagagcggtgtcaagatgctgcactgctggctttgaagatggagaaagaggacacagccaaggatgcaggaggcctctaggaggtggaaaaggagaggaaacgcactctgccctggagcctccagaaagaacgcagccatgtgggcaccttggttcaagtttctgtgtcacttagcttgtgggaatttgtcacagcctcaacaggaacctacagaggagtcaccttgtgtgcaggtgggatccagggtcatttacagctaaatcctgatgtaaatattgcaggttgcttttcctacttcctatctcatggccaacaaccctggacaatggcagaacacccttggaaaccacggctctgtgctttagtggagggaccagcttgtttgtgggaaggtagcacctggtccaagtgaacctacatgagatcgttactctccccagggccctcagggaagggctgagaacagctggcccaggtgtgtggaggagctgcaggtgaggcagggctggaggggcctgtgggtccaggtagaggggcagacaggttgtcccatcgccatgggagcctgcacgagctttaggttggggaaccctgctcctctgacctggacgctcctgtgtggagaggaggcttgctcagtgagatccacgccagggggtaaattgggaactgatgggaaatgaggggctagagtcctgggtagtgcctgggaggaccttgctcaaggactgaattcttggtctgttcccaccttggttactctgacaacccctctctgtgtcccacggggataaagatctcctgagcagtggccattgggacagaggagaacctggtggccagagctaagcatccaggatcctggatttggggacaggcaagctcattgctgggggacagtgatagatacggcctccagggcctgggtgaagagagcaggagggctcaggacactggaggctgtgtggaggtcacacccacgatctgtaccacccatggatgctcctgcattgctcacctttgtgtggacatcagatggccccaacttttgcactcctgagacatctcatgcattcacagagggacccaggctggggctgtgcatggccttggtctctagggtagtgtgaggacagctgagcactcagctggctgggcaggactcctgcgaatcctgccctttcctgtgtagggtccaccccagcctgactcctaaccccctactcctgtctttccagggaagagagactggggttgagataaggtggagatatttttcctgtgtgacccaggagagaatggacatggagtttcaggtgagtttctgctaagttcccatgagcagaaaaagagccaatgagaggaagtttcccctttattcagatcctttccaggtgaccccgggtgggccataggcccattcactttccctgcaagcccccgcttcctgtggtgatgggaagccttcgccttggcccacccagagcccggggcagtctgttgaggtctctatatattcagcagggacccccatcccttcctgtccccaggcctgtgtctcctcaggactcagagctggttctctggctcaggctccatgtccttccccatccccagggctgggggcttcagggacgctccatcaacccacaggagcagctcccagaggaacctaagaagccacatctgctttgtggtcgatccagcagtaaatgtttgtgtcagagtgtagcaattccagtaaaaacagagaagaggtcttgacccctgaggccttctcagaacagggtctggcatctctctctgggcccacccagggctactctgggactgaacctggctgtgctcagggggttcctgctcccaggcccctccctcctctgctcaccacctcctgttattttcactgcagtttcctgaacttcagctcagccagatgccagtggggacagatcctgggtctccctggggcccaagggaccagaatatctgtggcccccactcacctcatagatgagagcagctgccctggtgctgggtaggggaatctgggcaggggagagaggggtgtcaggggacagggaaggattcctgctgtgtaggaattccagggctctcctcaggtgatggagggtcccagggtggggttagcacagggagtggatgatcctggccctgaacagaggcccagctcatggccagggcaggtctaaccttatccaagtcattctgggtagggtgggtttgtgctggggattgacagtccccctgccctgagcctgcacagctggggccccagtggaaatgggattgggaacggacagtcttacctaggagatggagctgtcagagggtccatggcctggggacagagacaaaagtgagcacgagagtgttaggatagctgggcccctcctgcaagagtgtgtgggggtcctcagttcttagagaattggggagagggagcctttctcaggttattttaggggtcaagtaagcaagtgaggttgaggaagtgacccatgacccagagcccggaggttagggctgacccggccagttggggtttcctgtgtgatgttttatgggatcctctttgcagccccagggatagggtcagaggcccctgggtgtaactggcaggagtggacaacttggggctggcttagtagttcccagccacacccagactgaagggacactcaccgggggtggaggctgggggctgctgctccctgaagtcactctgatcgctggccctaggaaaggtcagggttatttgtgaaggtgcaaggttaaaagtcacaaattggagttaaaataggggaccaggaaaggagcctatttccaagaggggtatggagacctcctttctttatggagttctgtggtaggaggggcccaggtgaggggagttgaggaaaggccttacaaagccacatctgtcctggccagaggggaaggactctcaggcagatgctgggccaggagaacattgatccagtgacacaggaaagggactgaggacccagggaaggaatcagaccaccaggggttgcctgagaggaagggtcaaggcaccagggggaaagcagggccaggcacatgtgcaggacactgaggggactgcatgcatcttggattctcctggaactcagtgtccctgctgtgaccagacactccactcagggctggagatgctgaaatgggacaatgatcttgtcttctgtctctgccctttggcaagagacataaacgacattccaggatatgccatattggggccccggttctcccttctcacagctcagtgtctgcagttaccatgtcagtcaaaggggtgctgaccccacccagcccgtccaggctgttccagtctccactatgtgataatgcccaggatcccccctcagatgccctctcactgggtggatggattcagtgaacagggggaggtaccaggtattgagcaccgctcccccctgctccaggcagctgtggctttgctgtgctaggaaactaggaccatgctcaggggcatggccttaattggactgaattcactgaggacaaagctgttgaggaagcagcccagggtcagcagctggtgaggaaggtgccatggaatgagagggaaggatccctggggagtcgggaggctggggagagcctggcactgaatacaagacagggtctccttccttctcgcctggggtcagcgtgaaggatgggagcagaatggggaaaagctgtggtacctgccagtttttcggaggagcaggaaacacacaagtgcagccaccagaagactcccaaccaggaccccgatcaggatgcctagagtgttgtcatctgctgaaagaagaaggcaaaggggatgaggtccaaatctgttccagggggaaccatgaggggccttgcagggcaggggcatggtcagggaggaaggaaatgccatggagcctgagtgtggtctgttgtgctgtcctcatagctggctcccttgctctccgtggttgcaccattttctgtgtcttaggcttgaattactgggatgcatcaactcctacattctcccacaggaagcctgcacctcatcctgctcctgtgttttttagtccctccttcctctcacatcactcctcttccccctgtttctttttttccatcccatggcagtcgtaaagggcaggcccttgctgccaactcaatgctgatgagcagggatgatgttcattgactgttttcaggggccttccacatggaaggcacagtgggaatcaatctacctgcagcttttctcaccctcccattgccttgagggagaagggtatgtgatattgtgaaatacgtatttggtgttcatcaccattgatatggttaggctctgtatccccacccaaatctcaccttgaattgtaataatccccatgtgttatgggagggaccttgtgggaggtaattgaatcatgagggtgggttttttccatcctgttcttgtgatagtgaataagtctcaggagatcagatggtttcataaagggaagcttccctacacatgtcctcttgcctgctgccatgtaagacatgcctttcaccttccatcatgattgtgagacctctccagccatgtggaattgtgaatcaattaaacctctttcttcatacattaccaagtctcaggtatgtcttcattagcagtgtgagaatggactaatacagtaaattggtaccagctagtggagtgctgctataaagatacctgaaaatgtggaagtgactttggaactgggtaacaggcagaggttggaacagtttggagggctcagaagaagacacaggaaaaaagtttgaaacttcctagagacttgttgaatggttttgattaaaacgctgatagtgatatggacaataaagtccaagctgaggtggtctcagacagagatgaggaacttcttgggaactggaacaaaggtgactcttgttatactctagaaaagagattggtggtattttgcccctgccctagagatctgcagaactttgaacttgagggaaatgatttagggcaactggtggaaaaaaaattctaagcagcaaagtgttcaagatgtgacttgggtactgttaaaaacactcagttttatgtatttacaaaggtatggtttggaattggaacttatgtttaaaagggaagcagagcataaaagtttggaaaatttgcagcctgatgatgcaatagaaaagaaaaatccattttctgaggagaaattcaagccagctgcagaaatgtgcataaacaatgaagagcaaaatgttaatccccaagacaatggcaaaaatgtctccagggcatgtcagagaccttcctggaagccccttccatcacaggactggaggcctaggaggaaaaaatgtttcctgggccaggcccagggctcccctgctgtgtgcggcctagagacttggtgccctgcatcccagccactccagccatggctaaagagggccaaggtacagctggggccatggcttcagagggtgcaagccccaaaccttggcagcttccatgtggtgttgagcctgcaggtgcacagaagtcaaggattgaggtttgggaaccttcgcctagatttcagaggatgtatgaaaatgcttggatgtccaggtgaaagtttgctgcagaagcagagccctcatggagaacctctgctagggaagtgttgaagggaaatgtggggttggaaccccgacacagagtccctactggggcactgcctaatggagctgtgagaagaagaccacaatcctccagaccccagaatggtagatccactaacagcttgcaccatgcacctagaaaagctgcagacactcaacgccagcctatgaaagcagccaggagtggggctgtaccctgcaaagccacaggggtggagcccaaggctatgggagttcagctcttgcatcagtgtgacctggatgtgagacatggatacaaaggagatcatttcagagcattaagatttggctgccctgctggattttgggcttgcatggggcctgtagcccctttgttttggccagtttctcccatttggaatgggtgtatttacccagtgcctgtacacccattatatctaggaagtaactaagcttgcttttgattttacaggcttataggtggaagggacttgccttgtctcagatgaaactttggacttggacttttgggttaatgctggaatgagttaagactttggggaactgttggaaggcatgattagttttgaaatgtgaggacatgagatttgggaggggtcgggtggaatgacatggtttggctcttcttcacccaaatatcaccttgaattttaataatccccacgtgttgggggaaggacccagtgggaggtaactgaatcatgggggtggattcttcccatgctgttctcatgatagtgaataagtctcacaagatctgatggttttagaaaggggagttcctctacacatgccctcttgcctgccgccatgtaagacatgccttttgccttctgccatgatttcaaggcctccccagctatgtggaactgtaagtcaattaaacctcatttttaaaaaaattacccagtctcaggtatgtctttatcagcagccaagaccagctcggtcgcggagatcctaacccagcagtgctagaggaattaaagacacacatagaaatatagaggtgtgaagtgggaaatcagggttctcacaggcttcagagctgagagccccaaacagagatttacccacatatttaataacagcaaaccagtcattagcattgtttctatagatattaaattaactaaaagtatcccttatgggaaaccaagggatgggccgaattaaaggaataggttgggctagttaactgcaacaggaacacgcccttaagatgcagattgctcatgctattgtttgtggcttaagaacgcctttaagcggttttccaccctgggtgggacaggtattccttgccctcattcctgtaaacccataaccttccagcttgggcattagggccattatgaacatgttacagtgctgcagagattttgtttatgaccagttttggggccagtttatggccagattttggggggcttgctcccaacagactaatacacccattttctggtatgtgactctaaagtccttagaatcttcaaagtgatgtctttttcaagctaataattgactgatgactggcagcccctaggcaacttcagaatgaggctggtcactgacccaggtaggattagagggttgggactttcagcctcacccctaatccctggggagggacctggagtttgaattaatcaccaatgaccaatgaatcaattaatggccaatgattgaatcaattaatggccaatgattaaatcaatcatatctatgtcatgaaccccaaaaggactgggtttgaagagctgaacccatggaagtttctggagtgtggtgcatctggggagggcatggaagctccacaccccttcccacatgccatgctctgtgcatctcttcatctgcatcctttgtaaagtcctttattacaaaccggtaagcctaagtatgtgtttccctgagtcctgagagctgtttgagcaaactaatccaacccaaacagggagtcatggaaacctcaatgtgaagccagtcataagaagctctggaggcccagacttgtgactggtgggaaggtggtggcaattttgtgggactgagccctctgctgatatgtccaggtagatagtgtcaggatggaattggaggacacctagctgatgtacggtgcagaactgattggctgctgggtgtgtgggagaaacccccccgcatcacatttggtcacagaagtgtgtctgtgttgatgattgttattgtggagtgagagcagaggaaaaacacagtttgagtttttccaaacagggtggaatcccatctgccaatttagaatctgaaacttatagtttcagtacttcaattaagattgaagtacttcaattcagtacttcaattaagattcagtacttcaattaagattcagtacttcaattaagattacagaactggtaagtgaaagtgatacaacaaaaatgtaaccaaagtctgctcaacttaacagctaataacaacaaagttcataaaaataataccagtcgatattgatagcactgattgagccctggctctgtgcatgaccttgttaagggctttaatcgcattaatctctgaataaatatcctcacaaccaccctgagatccaggtgtttgtaacaattctacagatgaggaaactgaggcccaggaggttgagtgtcttgcccaaggtcaaatacctggtacctattgtaaccaggatgataactggatgagtctaatccctgagttcttacccacattgctccccaggctctgaaggaatctcatccttctcattccgtgtatcattttacaccccccctccctcctaggaaaatatacaaggaaaggagtgagaggggccgagggtcactcacattttacagtcagcttgagggggtcgctcctgttggagctgactgggttggagacctcacactgatactccccagcgtcctcctgcctgatggggtctatggtgagcatatggttaaaccaggacagcttcatcctcttcgtgacctgcagacgctggttgttgaaaatccactggaaagaggttccagtgttatttgtgtggcaggtcaggaccacggagcccttctctgtgactgtggtgctgctggcttggatggagggctgagccactgactctgtggatagagtgaccaacagaaagtgtcttggggccatgctgcatcctcagagatctcagagtcaaatttagaacattctcctgtgaataaaggagaaagatgaaggacagggaggagcagagagaaccagagacacccatagcagcgagcagtagggactacagtgacctcagagaccccagggaccaggaggacccagctgcctcagaccaggaccagggagccctgaaaaccctcccacagatgagcggccccagagtcacatgagatgcaatacctggggtggctttaggagcaggcagtcagagaaatggaacatgggtctcagcccctaagggacaaggaagaggtgtggccagctcctcctaggatcctacatccaggacccagtctgtaaagaggttatgattattcctttcttttttcattaattccctccctccttcatcagagaactactgagtgtgtgtctcagttgggccttgtgcaggtacagggtgtagtgggaagagaaagctgagtcctttccttcatcctcccatgggagtgacatcaacaaatcaagaaattcatgatttcacgtccagtgagggaagaaatgtggatctgatgggagaggcttggacaatcctggcattgagtctgatagttgagacaggtgatttcgttctaagtaaaaactgactaattctccatttgcccgtcattcctcagaccagaatctccctctctgagctgaggatgcccaagaagaaaggagctgaaccaacatctggtcctggggtccacagatgccccacggtggtggccacgaccagattctgggctgcagacacacggtggtgtgacgttgagcactgacagcctgtgtgatgctgatgcaatttctctttaataaaatggggtaaatgtcaatggtccctggcttgccatcctctctgtaaattaacattaaaatatttacaattacctgacctaaagcttggcacagaatagctccaaataaacatcatctattattattttactccaaaaaaaaaaaaaaaagagttctctgggcctgattcctggtggagaaggagcggtccagagtgtcttttctctgctttccctcctcctgaggacagtgcacttcccgggacatcttttaagtttcccatccagtttaatggcctgggaagtttgtttgtctgtcctctccactctgactctcaggtgaaagatgaggctctgcccttgcccagatggggctctgggggctgagccctgcctggtgaccagctctaggaaccacggccctgggacagctggtaaatcgttgctcacaatcagccctgcccaggaagccacaacccagccctggcacaggctccccagggtcatctggagtcaggatcttgggacaggggcctggggcaggggcttgaagggctgagcttctctcagaggatcctcaggccaggccctgactgagtcctataagatctttctcaggtcatgtctatgaggaggaggccaagcggggttggactgagactgattttcccccgctgcatctcccgcatcagactatccttcttgctgtagggaatttccacggagtccggataagggaaaggaattctgatctgttatagtttgtctcccctgggtgtgtcctgcactaaatgcccaaaccccaacatgggacgtaatgcagagggggatgcaggcacagcccaggcctgacaatcctgcgtatgtgaagcagaactgacccccaacacccagaggcacggaggaatcactcaccgtatacacggagatggtgagatgcctgttcaatctgagaatttctgtatgtgacttgtagggtgtagtatcccgtgtcctctagggtgacgttctggaaatgcagatctccactgggtgatattgtctctcgaccgctgtatgcaggccctggagtcctaacgtgagtgtctattacatatgctgcgattagctggttgggctccaccgttttccctttgtaccagccatagctgtaaagattctcgggcagataaaccacagagagatgaacattctccccttcagcaacttcaaagggcgctgatgcaataaagagccaggcagtggtgggtgcgttccagaaagttaaaagtgaggctaggaaagggagagaatatcagtcaatatttgacctatgcattggcatggaaagacggggtcctgggtgcaggtctcttcacccctcagccttagagggtgtgtgtgtgtgtgtgtgtcctactgggtcaaagtcagcagcatgaccctcattccttcagtacctctgaccttggcatttccttgtgtgaaccctctttcccaggggtctgcatggttccctccccactgccttcagttcctactcacacaagggaatccctgggagacttctttcgtgaagcctcctctagagaccctgggtcttccctttctgacctttcccagctctgttccctccagggctcttgtcagcacctgacctcacattctagatctctttgggtgtctgtcttcccccccatgagattgtgagctctgtgagggcatggacttgagtgatgttagttgcaccccagtgcctgggacaggctgcagactcctgtggatgagttcatgagcgttcccagggccttccatatcctggggtttatttgctaatgtctgaggttggcagatgaagacagagtttcatgccctggtggtgtttttatttaaattgtcactgtgatatagttttactatcattttcaaaatgtagtggccactgacaatgaacttgaaaacatggaccaactgagattgttttgccccttggcaattccagttcacttagattttttggttctccttagacgctctctcccctgagtctctaacaaaagccctctgtctcctctcagagccccatcctccccaggagaccccagccagtctctgtgctccctcctcccacccactcccagggagtcctcccctcacctgtgagcaagagcccctgccaggggatgcattctctgtggggacaagctgaggggggccccatggtctctgctgcctgctctgtcctcctctgtggagaggagcttgggctccaggaacgctctagacagggttactgtgactgttgtctctgctgtccttccttcctctatgctgagcttcctctcaggcaggagcacttcccgtttatgggcaagggcggggctctgcctacaatgtctctctgtcccctcccctctcagtcctgcctcccttgtccctcctttctccttcctttttgcctatatttggttccctaggcaaaactttgagaagcaacgctgatggggtcctcataacaggacgacccactctccccagtactgacctctgctgtgttctggccttggttctgtcacagccggtagattatttccctttgtgacacacaaaaccagctgggccctgggtctcctcatgctctccagtgctccaggaaggcagaatgatgcccagcaggaaagtgacagaggtggctctgggggctagaaaggggctcactgggtgatggctgggaaggacccacccgctatcttcagtgtcaccagcctggcctctgacccagggacagagacccaggcctggaggtctcgggaggatccccagctcctaggtgtggagggaggtgtcctgtgtgtcctgggaagagaggactttgatggaaggaggtgggaggctctgggttctgctgtccttggtgaaggtttcagggggaccctctccatgtctggggtctgtgcccccagcttaactctcattctctttgcaaatacatatattttgtggatctgcagttgcctgaactgtctcatgtccctaaatctttgtatccctttttacagaaggtcaggaagggtgtgtacatgagtatgaggactatctgatcagggcgagtgtttgtttcccaaagatctctttagatatggtataatacataagataaatgtactgaattagcaattttaagtgtagaattaaatgatactaattctattcacaatgttgtacaaccatcaccataattttttaccagaaaatcttcattataccaaatggaaacttcatacttttaatcaataactccccacttccccctgccccacccactggtagcctctgatactatcaatctctgtgaatttgcctagtttacatgtctcatataataaggaattatatacgtgtattatttttttctggattatttctcttagggtaacacttttaagattcatccacgtcgtagcatatattacagcttctttcctatttatggctgagtaatatcccaatatatgtttatacctcaattttaattcattcatctcttaatggacatgtgggtggtttccacatttttgctattgtgaaaaccgctgcaatgaacttacacttggaagtatctgtttgggtttctgtgttcatttctttgggggtacatataggagtataaatatggggtcatgtggtagttctatgtttaagtttttgagaaacagccaaactgttttccagtttgctgtgctattttatattcccatcagcaatatacgagggttccattttctctacattcttgtaaacacttactatttaatattttttaaaacttatagccattctagtaggtgtgaagtgatagctcattgcagttttgattttcatttccctggtggctgatgaagttgagcattttttcatgtatttactgacaattttaatattttttagagaactatttattcaaatcatttgctgtttaaaaaaaatgggttatctttttattattcagttgtaatagttctttatatattttagatacaagtcccttatggggtacatgatttgcaaaatttttctcatattctgtgtcttctcactttcttcatggtgttctttgaagcacaaacatttttaactttgatgaagttcacttatctatttttaattttgttacttatgctcttgatgtcatattgaagaaaccattgcccaatccaagatcattaagttttactcctatatgttcttctaatggtttgataagttttgctattccatttaggtttttgaaacattttgagttaacttttgtatgggctgtgaggtaggggtctaactacactatctcgcatgtggttatccagttgttccagcacaatatgaagaggctaccattctttccccattgaggaatcttggcacccatgtcaaaaaccaatgggctgtaatggtgagggtttatttctggactcttgattctattccattgatctctatgtgcattcttgtgccagaagcacactgttttaatgattgtagtgttttagtaagttttcaaattaggaagtgagtcctccaatttttttttccagattgttttggccattctggggtgacttttaaaaaagatgtagttcaatggttctcaaagcaggagtggttcagctctccttttttggcagtctggagacctttttaggaccttaatctaagtagataaattattcccactttcttttctgagttgctatgttacagtgtatattgacacccatgaaataattgagagaccctggaagtgcttgcctacatagtgagggacaattagttccatgatcatgggcacagaagattttgttttgggaaacaattttgttggtggagttatattcatgcttactcttttatttgtcttcatagcctgcatctccttcagacttcatatctgtttattttcttgtttgtcctctggggtttgggtgttgggtgaccagtcagctggagctggaggaggtgcttagcaaggcagtgaccctggttgggaggagcagggctcagcagggtgaaagtagctgggccttgagtcaggagtggcatctggaaggcctgactgtaagggtcagaagggccagcaggtgggtgtcctaggcacaaacggtggctgctgctgtggactggaggaaggtaagaggccccgagtattccatgttcttactggctccccaactgaggattcctctcctgggctggtgctgtcctgcagcagggaggggttagacagggacggctgcacatcaggccggagtccatgtcatcctcttaggcactgtcactacagattgaggattctgttcataagccaagcctttgcacaaggaagggacccgggctctcaaggaagagcagctcctggtcagacctccatctccttctctctcattgcctgaggcctcaagcttggtctacctggcacaggggtctggatcctcctcccagggttggggtcttactgagctgggcacctgcaggtgggagaagatctggaggggccccatctgccttcaccagattgatgttgagggtccctgagtcctgcaccactatcaggtgctgagcaacttccagtgtcagtgacaaccaccccatggtggaagcagaaccacctcgtgagaaagcacctccaagcctcagtgcttgccatgtgtgggaatttgctggtttcagttgggggcatgttggtgggtggtcatgaattcagggccggattctatgctcacagtgcacatgctggatgtggtacagaccccaggcagggctcagtggggtggttttgggtgtgcacaggtatcttttctggaggagctggtggtgatttggctcccagaagttcctgagctctgcagactcaccaagcactcaatatttgagtgaacattgggcgagagagcagaaggtaagtgtcagggcatcggggttggtgcctctgggaagaggaggaacattctgggaacaaagctctcccccggcttacagggagcttcccatcgctcctgccttgaggatcagggaaactagggcctctgctcttccaggggctgcttgcaggcagtttgctctgggagggggtgacccaggagttgcctctcattttgcatttgagatttaaaaggagaagggacagtatatcttgccaggtcacaaaaattacaggcatcatattgactgaagggcactcctgtcatcactgcaatataccagaatggtcttttaaaaaaataagtgatttaggtttaccagcaactgtaatgcttgttttattcttctagttcaccgttaatgtcacttttgtagttttagcactggcaatgttgattttatgttgactctgatgattttaagctttcatttgttcacatagagatcatcttctttctgaatattaatgcattttttctctatttctactggttattcctgtacatagagtagagaatcacttttcccaaggaggtggaaagcttctgactaccaaaaaaaaaaaaaagtgtcaaaatgctttaaagtcagtaacttaaagatcaaatccaagagtgggcaacagattctgcccagggtctgaaaggtggagaggtgactggtgaggatgtttaaaagacctctcctctctactccctaaatgggggccatccagtgttcttgaggttcagagaaggcccagggctggggcagcagggcactgtcagctcccagctcccaggggccaggagtaagaccccaacactgtccagacactgattgcattcattttgggggagagtagattcttatttaaagaataatacaaaagtctacaaatatgaacataaacagaaattcctttgctacaattttccccttaataagacattccttcctaatgacatatgtgactgcattcatggctgagatgttttctaggatggtgagagcatcagagtggactatctggtgccttggggtcatgcattttcttcttccaatgtctacaggatcccccatgtcccactttgtagtgtaactcagtgtgtgtcattctggtttttgttgtatagatccttggaaagcccatgtcattcctgctgtgaggtacaggcagccaaatggcatcatctctaaacatgccttctcctggtacatcaaattatggaataaatgaaagccattttgacagatattgaagatataagtttctactcttcccacacatgcttctcccaagtgaaggattttactggtgaattgttattagagattagtgtggatcagtgactctgccaggggaaattttgccctctaggggacatttggcaaagtctggaaacattgttggttgtcagagctgggggagggagtcctgctggcattgagtgggtggatggtgctgaacaccctgcagttcacagagccccaccagtttgaccacccaaatgtcaatgctgaggagtggagagccctgctgtgccctcccgcagcttccctgaagcttcccctcacctgctcctcccatgtctccccaccacttccccacttcacccgcctccttacacctcagtcccctccacctgaactcaccccttagtccaaggccagccctgatctccgctctcctggtctccttgctccttagcaggaggcgcccactagatggcgcccttgcccttactggagctcaccgtctccctttccaccctgagacaaatgtggctgcttttactgccacaaccccagccctccacactctagatttgctcagggagcagctcctggacagacctcagggaccccagggaggagcctcactctggagattttgatggcatggtctttgaacttcactgttacccccagtcaggatccaggatgttgggagtgcatgattctgcccggtcccacttcagcaggaccccactgctgagttgtctgtggggacccgggcctctcatctccttcttgcattgcaggagagggatcttagcactgctttcacataaagtcagataatggaggagtgcaggtgagtttgggaaggtggacatgaagagaggttgtgtccctagaggtggcagcagtgagaggatgggcaggtgggaggaacacagcccatccagggttgccagccatattaggagcgacagcctttcctctaagcctccagcctttttcctgaaacattccagaactttccacttcagcacttcccactgaggctcctcaggtctgtccctgagctcccagctgagcctacctacccatctgaaatcctgagtcctgtgtcaccctcgttccccattattctgtgcagttctgtgggacgcccagctctcctgacacccccagtcttcagaatggccatcagcgctgtcgctgtggcaccagggtgactgccgcctggaggctgagtcctggcttcctgacagctgtggggcccgctctaggctcccttgtcctgatcattcatcacctccaggatgcacagcagctgggccagggggaggagcagggacaggtgtcagccaccctgtgtgtctgcaagtcaggctgggggtgtgggaggacgccaggaatgactgaactttctgatttagagggtgagagcttgcactgatggaatttgggatttaataggaaaagcatagcgttttcctattttgtaggcagggtggctggagtttggaatcatagattcccctgggatgtcactgtggacctcagtcccacccgttaggggcacagatttcagaatccacaccctggggcaaagcaggcatgggaggctccatcagcctggccagggctctctatttgtgcagctgctgcaaggagatgtgcactctgatgggaacagtgctccctcctccttggggggcagtatctagctccctgcagcccctctccctgcaggccctgccctctctgaacctcaccttccccaacccgccccccgcaatcccatctcagctgtaatcccaacactttctcatccattatgggtggactgcttgagcccaggggttcaagactatgctggctggacaatatagcgagttgttgtctctacaaaaagacaaaaattagctgtgcatggtggcatacacctgtagtcccagtcactcaggaggctgaggtgggaggattgcttgagctggggaggctgagttggcagtgagttgagattgtgccactgtatacttcagtgtaggtaacagagcgagaccctgtctcaaaaaataaaagtaaaaaaaaaaaaagaaatatggaatacattattgttaactctaatcaaccatgctatgcaatagtccaccagtaataccagtaatagccaataatgaattatctgaaaaagaatacaatttattcttagctatctactgctaaaatttttaagctatcttttatgatagctgaaacaaaagaagtaaatttaaccaaggaagtaaaagacctttataatgaaaactgtaaaacattgatgaaataaattgaaaaagacacacgcacaaatagaagatattccatgttcatgaattggaagaactgatattgctaaaatgtccttaccacccaaagtggtctacagattcaatgcaatttctgtcaaaacaccaatgatattcttcgaagaagtagaagatcctaaaattagaaaccacaaaaattcctaaaacctgcacaaaacaccctgagttgccaaagcaatcttaaacaaatagaacaaagctagtggcattacacttcctgacaatcaaagcatactgcaaagctatagtaaccaaatcagcatggtcctggcataaaaacaagcacatagatcaatgaaacagaataaaaatcccagaaataaacccatgcatctctagctaactgattttcagccaaggagccacatgcacacaatggggaaaggacagcctcttcaataagtggtgctggggaattggatattcatatgcagaagaatgaacctagaccctatccctcaccatgcacaaaaaattaactcaaaatgtattaaataaagacttaaatgtaagaactgaaactatgaaactactagaagaaaatatagggggaaaatccatgacattggtctaggcaaagagtttttggataaaatctcaacagcataagcaacaaaaccaaatataaacaaacgggatttcatcaaactaaaaagcttttatacagcaaagaaaaaaaaggccagcagagcaaagagacaacctacaaatgggaggagaatatatttgtaaatatatacatatatatttgtaaatatatacatctgataagaagataatatccaaaatatataagaaaattatgtttctgtatagttttatctgactgggatacagaggccacatccacagtcccatcctcaaaggccacttgttcccaaaatgtcaagcacatccctcaatgatccatcatcaacacctatgtctgtaggatgaagggtgaatcatgaagcactaaaaaggaagaaggaagccaatcccaaaacaaaatgatgcagggtctggaaagtccaaagcattttttttttttttttactgcatcttcctcctttcttctccacattcccaatcctcactattgattaacaaaacaaaaaaaactgggacccaccatcttccctactgtcaggagatctagcgagattgtttgagtcttagaccaaactttgccataagccaaatttctggctgactttacaatgatatgagctagcacagtctctttttctgccagtcaacttgtgctcggttttatttgcaaccaaatagaggtggtaaccaaatataggtgaccctaaaattagtcatcaggatgaaatcctaaaatgtgcaacaaactgggttgaattcaggattagtagcaacatctctgttgtgggcttgaaaagggggcacccttttatgcagtagcaaaattgctaaattgttgtttgctgagtctttggactctcatcccggattttctatgaccattcaaacagggctgcaatgaacatctatggttgtttagcttggcacacttctacatttctatatagtaatatctagaagtgcatttgctcaatcacaagatatgcacattttataattgactgctatcgaactaccttaaatagccttaatttgttctcaacattgtttaacagggtctgtttaatgtcctacgtccagcaaggacagtatcacttttcttaatatttttcaaattattggaccttaacaaatacttaatgtgcaattaattgattcctttgtattcccatgccttcttttatatgtttccttatagtacacaaaaccacattattgtttctttacttgtgtcattccaccctggaccattcctatctaaactataacattatgagagagagagagagagaaaacaatatgaaaatataaattgattaatcaaaaaaatttaaataggacaaatcaggaagacacaagagagattttaaaattattcagagaataccacaatagctgtaccaatatattttaaaacttagatgaaacggacaactatctcgataaatgtaaattaccaaaactgactcatgaaaaaatggatattatgaatagagcaataatcagtaaagcaattaaaaagacagttgataatttttatttactgacaacaataacaaaatttcaggtcctgatatttttatggtgaattttaacaaattttcaagctcctcctcaaccaattctcagaaggtttaaaactttaacaagaaaacactttctaacacattttcagaagctgttatagcatgataccaaaaccacacaagaaaattatagaccaatctcacttacaaatatacatgcaaaatcaaacaaaatcttagtgaaccaaattcagaattaataatagcaaacaagcaaaatatgttatcatacgtatggcttatatcaggaatgcaagtatgtttcaacatcagaaaatacttctccacattaacagactaaaggagaaaaacgcttgtttaattatctcaataggtttttagagaattttgaaaattttataaagttatgcgtattctgtaaaattgatgaaatccaaccttgatttatttttaaaaattgcctttcctatagaattataggtaaaggaaacacatgcatcctcacagagctacttcaaggctaagttacttcccataagtaacgtatcctgtaatgtgtgcttggcacatattcaatactaaacaaatatttgcaaatcctcaaaccacttctcgctcaaataacccacctttgtcttttgcctttatgttagggttgattttctcaattgtatcttggagatcctttggtgggtctttcagcaattaccctgaatttgcttttctgtttacaattttaattcctgggaactctttcttgttctctgactgcacccttttcatgagagttcagccatcaatcctccagaaccccaccccccccgcccccccaaaaagcaataaagatgtctaaaagcttccttctgggctttcgaatgatgtttaccccaggcatttgttctattcgttcatcacccattttccctacaacttgcctacacttgatatcagatttttatttattagtcacctatcttcttcattggcccattttcctattttgccactggttgttctcaaatgtgttatgattcctggttgtacagtcaagtggttgataatcttggatatacgataaagatttgctctgtagctgtgtgtaagcctatataaaagcttttgtatttttcttcttaaaaaagacaaaagatggttgggaagatccctccagttcaccagttcgaggctgcagtgagctatgatagcgccgctgctctagcctgtctgtctgtgaaaaacaaggggggcggggggcgggggggaagactggagatgtaaatctcccgcagggccctacccgtatccgcaacaggtctctaacaggaacagcctcaggcctgtgttggaacaaggtaggttacagaaatctggaagccagatctgtaacttcagggtaaggactggctctcagggctgatcccccgggctgggtgtcccagaggcacccgcccccgccccttccccaaggcaggccaggacaccttcactcctctccttaggctccccacccccttctcctccccactgtgcctcctggagtagcggtggcggtgccacaggggagcggggcggggcgggctctgagggcaagggggatgggccccgccggggtcactggcggccaccctggaaactcgacgcaggccggcccttctagtgaatcgtcccagccacagctggcctcccagccgcgcttggggcgcctcggggcgcgaatggtgcaggttggggagactcaccacgcaccgtcgggggtcggtccggttattcctcaccgctcggctccagtgggcgcgcgggcctctcctcctcagttcctgcgctgcagtccctccctcacccttcgcagcttgggaatccaactgtgtcattccgacggagcgccgtgaggacctccgagggtgttagcgccaagtgatctctgtccagcgctctgaatatccaagtaaaggagttcaatgaagggcgggtcaacggaggagaaaccgtgactctctcaagggagcccaaggcctccttgtctaattagtgacgcgccaatggatggaggctcttcccaccatctcttcccagcatccagtgacaccaccgccaagggacgggctcggcggaacctgcaggaaagaagcatcggctgagcctgactgcagcgctgtgaagagacaggggaggggatcagtagttggtcccgcgcccaccccctgtttccgcgaggggcggagttgactggccatgcaggcagagggcgaaatgtgaaattccactactcctaccgtttttccctgacccgatggggcggagtgtcgtcaggctaagttccctggcggtaaggtggggagattgaggcgcacacctgccgaacggtaacgcaggattagctaaggcgagctcaggacagaagcctcccgaggagcaggagggcaaaataataaataaataaataaataataaataactcactccttggtctttatttgcggcaggaattcagaaggtgaaagcggggccttaggatctttctgaccttttgggttttaagcaggaggtgtcagaaatgttaccacagggctagctggcttgtggccagcaagcgttcacaatgccctcgatttttcatccctctctgtgggttctttttttcattgtaaggcagaatttctacgattgctcacccactcagagaacctgagctggtttagaccaggtgagacaggctaggtttaccctggtgatgatgtgttgttgccatggcgatcctgcccagtaccagaggccctgcagattcagatgcttggtgcctgtgcttggctgaggggccaatgggtgaagctgccatctgcgggatgatgactgaagcctctaagtcagaatccgcccaggctgagccttagggcagctccatggagcctcggctggcctgggatagagagtccaccactgtgccagcccccagccactgcctaggtcctgtgctgagagccccttgtccagggaaatggcgtccagtggaaaagggaccacccccttgcccttcactcaaggcaggttggtgacaaccctgaagctaatccgttcctagaggagctgcttctgggtccgagttttctctgcagcagagcagctccctggatgggatctgttcaaagtccgcctttcacgcggaattttccgtccttgcaattttccacctccaccactaggggatcctctctgaccgcctcatgccggctctggcctctgagcaggggtttctcttctgcatgtgcgaccttgcgcatgcctagtggccttttgggacctagagctgctccacaccccgatggggttacagagtgcctcgcctccactccaccccaccagggttccttccctggctgggatgggatttcagaagcgccgaggaacagcccagacaggtgtgggagagtagccaaggcccctgtcccggggtggccaggacagcggtggcctcgcataggacctggctgggctgctgcaatcagtgtcctgccccttggagagcaacagtgaaaacaacaagactatcttcacccaccttaagaaagaacagaaccagtatccccaactctgctgtgtatcccaacccaattccattccccaccccactctcagtagccaatatgcaaaatattagaatactcttactgttattattttcaaccacactctgcatcctgaaaaaccatatatttcgttatgtgcttttaaacttcttgaaaatgaaatactgaggctgggcgcagtggctgacacctgtaatcccagcacttcgggaggcggaggcaggcggatcacgaggtcaggagatcgagaccatcctggctaacacagtgaaaccccatctctactaaaaatacaaaaaattagccgggcgtggtggcgggcgcctgtagtcccagctacttgggaggctgaggcaggagaacggcgtgaacccgggaggtggagcttgcactgagccgagatcgcgccactgcactccagcctgggcgacagcgccagactctgtctccaaaaaaaaaaagaaaaaagaaatactgaattttcaaatacttgctttttttttcggtcaaaattatgttctcaaatttcactcctgtagatgtgcgtggctggctgtagtttttgcatttttattattaggtattctcctgttgcattaatatgccacattttatttctctcatgtttttggtgaccacttggggtgttttttggttttgtatttttgctgtatacatgctgccatggtggacatacctctttatacatatttcctgttgtatgcagacacaattttaggatgtgacatcttcagcttttctattgtgtcgtgtgtcttttccttcgtgctttgtgttatttacatattctggacacagattctttgtcaactgtatgtgctgcacatctctttcccagtttgtgtcttcttcttcttttttttttcttaaaaaaaactttctttatagtgttttttttttctttctttctttgttttgttttgtttttttgagatggagtcttgctctgtcacctaggctgaagtgcactggccgatctcggctcactgcaacctccgtctcctgggttcaagtgattctcctgcctcagcttcccaagtagctgggattacaggtgcctgtcaccacacccagctaatttttgtatttttagtacagatggggtttcaccatgtttgtcaggctggtctcgaactcctgacctcaggtgatccaccctctttggcctcccaaagtgttgggattacaggcgtgagccacagcacctggcctgtgttctttcttaagtagatgttacttttaatataatagaatgtatcatattttgcttttatattagtactttttctatctaattcaaacacatccccaagggtctttgtgtgtagactgaccaatttctcaagaatcatgaatgaatactgcttctctttccccaatttatctgtaatgctacctttattataaagtttctatgcatgtgtagaaatagttcctgatttttcactctgtgccaccagcataccaatagcacgctgtcttaaatattaaatagcagagctttatgagacaacttgatgtgcagtaggcaattgcccccttgttactcttcttcagggttctttgttgtaccacatgaattttagaattggcttgtccagctaaaagacaactgcaaggattttatttggaagttcataattctatacataatttggggaaagtattttcataataccaagtcttcctattaatgaacacagactctctctctctctcccccacccccacctgtttagttatttatatctttatggtctgttagttattgtttattgtctttcaaccaggtttcatgtttttctacatagaggccttgcatgtgaaagtctttcttcctagcttgctattacaaattttttttaattgcactttttgggtacagtggcttgtactgtaatccccgatacctgggaggctgaggcagatggattgcttgagtccagaagttcaagaccagcctgggcaacataatgaggtccctgtctcaaaaagtttgttttaaaaattgcatttgctgttattcaacaaatgtcattgtgtctcatatatggatttttatatctgataaccttgttcaacaatcttttgattctaacaatatatcagattcttttgagttttccatatagacaataatgtcatctgtaaattataattgtttcttctttgttatttcttggaccttttattttatatttttgtcttgctgcaaggcaatatccctctatatattgtggggtcttttttctcataaagtggggatggtgaacacccttgtcttgctctctgattgtataaagcatgctttctgtagcattttgtagacgctcttttttagattgaggtaattcacttttatttctggtttactgagtttttagcataaattcaggctgaatttgagctaaagctttttctggagacatcatttgaaaaattcatatgatttactttctttaagtcaccaaagttatgatttacattgaactgagtttctactgtttaactgtattcttgggagaaaacccacttgtcactgaacaatatctgttttatttactgctgtcttgtgtctaaattttcttttaggattttttgtatatgctcagattagcctgttattctcctttctgtatttttttctggtttgggggtcaaagttataatagcctcacaataagagctaagaaaccagccctaatggaggccggggcaggaggtttggagttcaagaccagtctgggcaaaatagtgagacccccatctctatgaaaaatagaaattagccaggcatggcagtgagtacctgtagtcctaggtacttgggagggtgaggcaggaggattgcttgagcctaggaatttgaggctgcagcgaactatgattgtgccactgtactccagcctggatgacagagcgagaccctgtctcaaaagaaaaaaaaagaagaaataaaaaggaaaagataaaagagctaagcatctgtttccttttttccattttctgggagagtatgtgtaagactgtaattaactgtttcttgaataatgggagaactctgtaaaataatctggctttggtgttacctgtattggaaggatgaaaaataccaattcagtttcattattggttgatagggctactcatgctttttgttttgttttgttttgttttgtttttgagaggaagtctctctgtattgccctgttgtccaggctgagatgcaacgttgttcacaggcctgatcctggctcactacagcttctaacttccgatctcaatagatcctcccgcctcagccttcccagtagctaggactacaagcatgcagcatcacatccagcctcttttcctgcctgacccagttctggtttcctttagttttctaggtgttcatccattttatctaatgtttaatgcatttggcataagggtgctcagtgtcctttcattgtctgttgtctgtaactgttgccattttcattcctatttatgagtactggcgtcttctctcactttttcttaataatcctgctggaactttgctttttaaagaacatcttttgacttgttgattcttttttcatacatattaactattttcttattttttgcctttatatttatttcttttcctgtttgaaacattgctcttttcttactataaaaatgggtaagtagctcatgaattaccacctcttttaaaaatcttttctactgtaagcattttagcagtttacatttgcccacaagtaccacttcagctacaccctatgtgcttttacataaagtcttcatttttggtaagacatattctcaaattttaattatcacttgtttttaaatccatgatgttttatttgaaatgttgtttctaaagatacattttctggttatacttttattcttctaatttagcacagtggccacaaaacatggtctgtgcagtgcatacaatcgatgagtaatttctgagctgtagtatttggcataatatatggcaaaatttcctaagttttccatgtgtgctttaaaaaacttccagtaaaatacataaatctgttagatcaagcttctcacattgttcaaatagtctatatgtttactgattcatttgactgcttgatttatcaattacaggtaggaatgtattcaaatctcctattaaagtgtgacactcaagtggctttttaaagacagagatgccaaaccaatgaatacatgattttccccaaagcctgcacaaattctctaatgaaattttaccatgaaagtttgtttaattaaggcttactaaagcagtatgttgtcttttactttttaaacagagaatatatattttaatacatcgtttaagtttatgattaattatctattactgaggataagaatctttgcctgtgctcattcagcatttgcacttcatttatgatctgccttctcatagcttctgttaatttttatactagagacatttatttgtttgtataaatgttgaaggtttttttttgttgttgttgtttttgagtcagagcctcgctctgtcacccaggctggagtgcagtggcatgatctcggctcactgcagcctccatctcctgggttaaagtgattctcctgcctcagcctccagagtagctgggactacaggcatgtgccaccaagcaaggctaatattttgtatttttagtagagatggggtttcgtcctgttagccagggtggtctcgatctcctgacctcatgatctacctgcctcggcctcccaaagtgctaggattacaggtgtgagccaccgtgcccagctgggttttttatattataaggagatgtaatagatagatagatgtttcaaagatagtcaaatgtttttaaaatttaaaacacttttttacaggttgactttcaccatttaatttcatctatgtgttttgccttagagaaattttaaatgctatgtagatctcatgacttataattatgaagcattttgttttctgttttccacgaaacttagcttaactttgagcatataatagttgtaaaggtaggagagtaacactgaaaaaaggaattgcataaaaatggcacattttctgtagagttgtttatcgcctgaaaataggccccatttcatggaagtaagatgatcaggctcaggtccccagacgaaactcttggcatggtttttggagatagtccagggctcagtactggctctatcatttgctacttctcccaaagtaaccaatatctcatccaccctgagcccatttccatatctctaacatgaggataatagcatctaccttacacaccaagtagagggatcaaatgtaggaactaaatcaaagtaccagcactgaataacctacatcctcccacttcccaaaaggaagagagatgtatcccctgttgacaaacgagaccattttgcaggagagaaaggaaatgccagttcacttgcaatgtaaacatgctctctctttttagggatgtccagggacctgagagagaacccatgcttaccaaagagtttctagttccagacacacaggactcgaagggtgacaagtatggttttcagggtccctgaatccacccagtcctcacagaaactcctaaaagctgtcgattgacagcgttgagttcacagctctggtcctcacatgctgatactgcttgtgatatcgaacccgacaggaccccacatcacaattgatttaccaactacaatataatacctcctgaatctccaaattggctcacccaggaacaaaggcttggggtaaaactggattaggagatataagctctgaattttctgagggtgagacacacaaggattctaagtgacacgccacagagtaacgggtctgtgactggaggacccacagatttgtcttactggagacaccacatgcacacaaactccatccttagctgtggaaacaagggtcttttgctatcttagccgaattctgggagtaatttttggaggggaggagatctttgggattgcctctttcaggccctttacaaaaatacctacttcttaaatggtaaagcttacactaaactgaaaaaattacatccttggctttttatgaagtaggtgttggattgaatcactactggaagaagtatggcatcgcaaattctaagcagtggtcaaaggatggatctgttaaattagaaaaatctctaaatttataaaaagattttagattcctttattctaaacaattgacctatttgtactcatgggacaatcaaatttcaaaggagatatgtaacgatttcatggcttgcattaaaaatccttctgataaaattaaagataaaaaatctgaccccctgccaaaaaaatcttttgaagttcatactgcctgctttcaatattctgtgggattcacaatgaaaggtgccttatattgtggcctagcttcaagtttatgccttcgccaccatggcctgggttcaattcccagtcagggccccagcgcctttggtttaatgtttgcgtggcatttgacttttttacctatttagtattggtgagattacctttggtaaaaaaaagtttaaagagtggaaatcgcaattctttgtgttggctaaaatctgattataagagatctggaaggttttatttttctttttcaaagagctctatggtcagaagtcggcttcatgaaaagctaatatttaattatatgtacatacagtctttctggattttctcttttgcctcctgttttgaaaaatatttggatttgagtgaaactccgttttagaaattaattgcttggtacaatatacccatgtaactaccctgcacatgtaccccctgaatctataataagagttgaaattttgacaaaataaaattagattttgaattaaaacaaataggtgcttggttcctctgctcacttctttttaaaaggaattcctctcccatgtacttcttcttttcccttctttaccttccttttggcatctttggtatcacatgaagggatctagagggaattttaagtgactctgaaattccttgagaaatacacaaaaagatcccactcaccccttttgggggtctcctgttctccttgtggagtccagagtcagggacaggctcctccaggtctgcagctctgctctcttttatttcatcttggctgattgctttggttttgtgagtaccaggcattactttgtactgtgagagacacgtcctttgtgagtgcaacggctgctgggtcactggtgagggctgcagtttggagatggctgagagccgttgcaataaatggttgtgattgcagggggctccttgtttctttgcaagtttagatgagaaaggtgcagtttggacacagtttaaaggctgtgaaaacaccaccaatgaatatgatttcctttggggatggtctgattaaaagtgggctgattgttgctgtgctactagccttgaagacatgtttctacagcattgtgcagtgtggaaaaattgtgtggcttggtcttgtggcatgtcccttcttttagagacctcagattcaatgtgaaattcgggatttttgattttcaaagatctagatgccctgccttccagatgtgcctactcttcacatattttaaaattagatcctataaactgcaaatactttgttggcttctgtgagatcagaggtccagttagaaaaggaagacagtttgttaaaattaaaaactatttatctaatctaactagattggcctccaaatatgactttctgacattcagctggttactctgaaaagatttctaaatctcttgaggctcatctatatgtttccttgcaaagaaaaaaaaaaaaaaaaaaaagcaagcccaagcactagtaagaaaaagatttgcaatgtttcatgaaaggagtagatgagtgaagcatttatttgtagatactgggttggatacctgtgcaaagaagaagaggtcaataataaaaattgccaggggatttcttggaacttaacaagctgaattaaatatagaaatgtcaggaaatcaaggcaggaaatactcacttgtggttaggcagacagggcagggttctgagcttgagatggagcaaacagttgtggtgggtgaagttcacatgctttagagctcagctgtcctagtaaagaagcctaagagtctctaaagctcttatgagaagatggattttttttgcctagattaaaaggttaaagaattgctttaagttggataaaataaagctaaatgtttaagcaagttgtgaaaggtttatgaaaaaattaattaaaatatttttgtgtgtaaacatattgactaaagttgaaggggtataattcagcatttctgtaaattgagcattgaaataaaaacacaatgggtttctcttagagcactaacctgctctttaacaaaaattgtaaagggttatagaaagtctataaaaatgttaccttatggtcaaacattaaaattgggtaaatatgtctatcaggttttattaagaattaggtttaacattaatagtacactaatgtaaaggtgaaatttggcttatttggtacaaaaatcatacaggaagcattgtgaaatataaaatgatttttagctttctttgggctatatttctataaatatgttattgatgagggttccaaagttatgggagactcctataattctgctatatctcagtgtacattatcagtcataattataattgtcatgttaaattattgtgggccacagaggtaacagatttccttgtcaattgtgtctttgactatgactaccctaaaacgttcagtcacccatatacacatgttaccttgttttggccctctttagaaggtaattttataatcagctataaagccctaacaggtgctcttaaatgcaaattttgataactttggagattgtgacatcagaagagaggaaaaatgttcgggacacttggagagctaaaatgttcattgatatcaagcaggacaggaattaactgcatgaagtgaactaataggaggctgaagtgatctttttgactttttgcttaaaacgttgctgatcctttgttttgcttttcagagtcaaggcaaattttcttttgagctattgacagcttttaacgattaatcaaaatatactcctatgaacaccatttggagcattatttgtttctctctacccgatttccccagaatttggaaactatttgtgggtattcttaatttatggcaatatagttatttgcataagtgcaataagaatgtgttttctttggtaacaggacacaatttgaaaaactggttattttaccaaggttttgaccagaatgctgtgctttcctttaaggaatcaaacttgacttgtggagctaataaagcctttggaaaactgaccttatatcctgtgaacacagtccctgtacagggttactgatctgtgggaagaaaagaatgtcacattctgacaggtcaggaatcccaagttatcttgaaacttcaagaggacaggaattcacccaaccatatgtatttgatggtagaaatccatggcaggggctcagctttaaaaagtcttatctcagattccttctataaaacaaagtcccattaaaaccaattttaaaagcctatgtgaaaaataattattcttgctgcacctcgtacaaataaagtggcaaagcataataaagcaaattggtcctgtcgtaatttgtctttagtaaaaacgggaaactggggtcgggtgcagtggctcactcctgtaatcccagcactttgggaggctgaggtgggcagatcatctgaggtcaggagttcaagaccagcctggccaacatggtgaaaccccatctctacaaaaatacaaaaatgagccgggcatgatggcgggtgcctgtaatcccagctactcaaggggctgaggcagggaagcggaggttacagtgagtcaagatcgtgccacttcacgacagcctgggtgacagagcaagactccatctcaacaacaacaacaaaaaagggtaactggagagagggaagttatgtttcaaaaacttttggaaactatagtacacctgtttttaaattctagtctggcattcagtttttattattttctacagtttgggttaaattcgtatttctctggctacaagtctcctaaataatcttttcatttgtttcctttttctttccctttttccccatttttcttaattggaaatcactgaaacctaagctgtgctttcttaaagccctgtgaactgaagactagacaaccgaaacttctgaaggaagtagcagcaacctatttatatgtgttgctgttgcctactattatgttttagcaggtgctgcctctacacccccgaaacagagagtgctactgggaacaaatcgactttttccactccagtgctgcattcggtgccccataacgatgaccccctctcagcaggaagtagccagaaagattacaatgctccatctccctatgattcttgtgataaataaatatacaagcatgatagaaatcatgcgcaaattgacagtggggattgtggcaggccagatttcactaatggaggtccccatcacaactacttcagtactgactgagtggttaagttcagtatcaaaagctgaaagtgccagcgcctttctacaaaggctagaatgtaacaaaagcccaccaagggttttacctaggcctttcctgggccttacagcatgacaaaacaaagaaggaattcttaaccagacctgtttaggattaaacaaatttaattgggggtctgaagaaactcgccaggcctccacaaacaagttcattgggggtctaaaggaaccccccccaaacctctgtgattgagcaggagacaaggtcagggtaattgccccagcacctggactcatttagatttaagtaaatgtactgaggctccagagaaaggtctccaagacttagactagagttacagattaaaagaagttaatcacttatatctttagataaatgcacactgacacgtagacatacatcttagaaaatatataagctctggaaaaccttgtaatttacagttggtctggagatattttctgggccttctctctgtaaccggttccagaaataaaaaactctcttcctccccagtttatctgcatctcgttattgggccgtgagaaatagcagccagaccctgagtttggtctgggaacacactggctgggcttcctgcctggcggtagagcttcactgtcctccttcccagccaaaatgtggcccttgaaggcttcctccccaactgaccggttttgggttctaggtactcagggaacaccgtcttcaaggaggccattttcatactgttcctggtttgatttttctgaaattaggaaatgccccttgaggcatccaggattgtctttatttcccctgaagcttcccctcctgaagaaaaaagttctcaaacaccctcaggactcaaaccccaagttcaccctgtgaaacattcccatttcctaaacccaggcaggctcatggccctcagcctctcagaccccatggaaacctcctcccccacttcacgggttctctccatattgagagcctcccctcctcggcacacaacccagagactcaccccaacatgtgtagcaaatcaccctggaaacaatcatggctgaacgtggtagcccatgcctgtaatcccagcactttgggaggcccaggaggtggatcacctgaggtcgggagttcgagaccagcgaggccaacatggtgaaacctcgactctactaaaaatacaaagttcactgggcattgtggtgtgtacctgtaatctcaactactcaggaggctgaggcaggagaatcacttaaacctgggagacagagattgcagagagccaagatcgcaccattacactccagcctgggcaagaagagtgaaactacatctaaaaaaaaaaaaaaaaaaaggaaaaggaaaagaaaaaaaaaatcatgaggcaacattgcatttaacaatattttatttatcaaaagacacttgtctttctcaggtaagtgaaggtctagagatgaaacgagtcccgatgtaaattgccccatgggcattgctgagatcacaagatcatcactgcagcatgcagcacaatagtaaatttctcaggatggaagttcaacaatccaaaaggtagtattttttttcatgatgctcagtccatcatacgaaataaaaataaattccttttcatgatcatccattcagtagaaaaaatgatagtaaatttgttctcatgaagatttttaccgtaacatataggatttatcgttattattattattctttgttttttgtttttttgaagcggagtctcactctgttacccagtctggagtgcagtcgtgcgatctgggcacactattaacctccacctccagggttcaagcatttctcctgcctcagcttcccgagtagctgggattacaggcatgcgccaccacacccggctaattttcgtatttttactagagatggggtttcaccgcattggtcgagctggatttgagctccggacctcgggtcatccgcccatctcagcctcccaaagtgctgggattacaggcgtgagccaccgcgcccggcctcaatttatcattattcacgcatccacaaactgggttcttatattttgtacgtgattttttccattgaggagagatatctgtgcatattcatgctgctcatatttcatccacaaactcggttcatatttcatccacaaacataattttttccgttgagaagagatacttgtacatatttatgctgttcaaattcacatttcatcattcttttacaagaaatagataatgtattttaaggttttccagtggtattacagatattttactgggtgtatagatagaaattaaaccaaacttctttgttctggccgccagtcatgcatcctgttttcaacatagttcacatacaactggttgtgtaaaaatgaaattattttgtttagtacaatcatcaacagttggttgattagatttttaattatcaagttaatcattgtcattatgcttctcatcgcactcgtcattaattgctgtgggaggaaatttgttatgttccctatgagagggtgtatcacaaattcaaataagaattcaacgacaatggactgtataaaggaaataagcaagtccatggaaaacatatttttttccggaaaggattaaaatatttttaaaaaggaattaaaaaaaaattgggcacggtggcaaatgcctagagtcccagctgctcaggagatggagacagaaggattgcttgagcccaggaataagttggaggctgtagtgaacagtgattccaccactgtactccagccagggcaatagagggaaaccctctttctaaaaagacaaaaagaaacaaaacaaaacaaaaaaacaccacatcaaaaaacccaacaacaaaatgaaaaaccaaataacagcaatacaattggagctattcgatccaaagaagtaaatgaaacataaagcaaataaaagagaaaagctaatacctgtgtcctgcaggactcagtccaagttctgctctgactccctcctggtgagccaccccttaaaaagtcacttggggcggggttactttgacagacagtcttctgtcaaagagggaggcggtaaatagcacttttttttttttaatttaacgcctttccaacaaattagcggctatgttgtctaagagtgcaaatgtcagaggtgggtacaggcagcaagaccctccccacaggggcagcagaaggaggaatgactaagggaacaagactttagtgtgctcaactacacaggacaggaaacagatgctttttacaaaagctggtggacttgaaggcagaatattttcaagttcctgtaactgcgaactatgacctgtagcctgtgagagtgactttctgtggcaaaggagcttttgtgaatgtgaggaagttaattatcttaacagtgggaggttctcccggcttatctagctagaccctcgtgaaatcccaagtgtccttaggaaggggaagcagagagagatttgagtccagaagaggaagaaggtgatgtgaggcccagtaggggaacaaagggcgatggcatgtaaacacttagcccccagaagtgggagagggctggggttcatcacaccagaatccctaacaatcagccttattttaattacccttgaaatggaaggaggccttagagagccagaggcttggaggggcaccctctgctgcatacacagatcccaactgctgtgggctccaaataattgcaccagggaaatcacaaattatcaaaaataaaggatgtaaagcttttaaaaaatattaaaagcccaacaaataaaaaaagttctaaatctataaaattgacctcagtctgtatatttagatgagtcatgtgtatatagcgtttcacttcaaaatatatgataaatctctcattcattggcttaaaaataaacacttcaatcaagtctttatcagaaaaattgaaacgttaactcaattgccttttagttcatgtgactttacaaaacttaaaacaataaagtcagttttaaaaattattagtaaagtaaaagaaaaatatcttcacaatgtagacattttgtccacatgagacatgtgaaatattgccattactaaatatttgcaggtcaaaaactgtttccaaaacattttaaataatcatctggcctgtctgttttagagcattcaattctagctgaggtctggggacatgtgaaaggagccacggcccgactccgtgctgggaagagtcagacattttccacagctctgtcctttgctgtgggctctgcaactcctaccaattaaaattgcttacgtttttgttttatttttactaaagaggggttcctaaaagctaacattatactgagtatatgtaactaaaactactaagaaaacaatttcacaattatacaaatgtgccaagtaaatgaaaaaataaactgtattttaataaaggttataaaaagaaaaacatatagtggtgtgaggactgtctcaggtcttcactgagcaagggatcatgacattctatggcggacagctgaccttggctttctgctcctcttgattatgtctactaagtgacatacttactctttttccacctgtcttgcctctaagggtaacaggttttatgagatccctcctagtgctttgcaggtcagcctccctttgctgcattccaattttactgcctataccctccagctggcttttgatgacaaaagtcctggtcccagccattctcagattctgtcatccccgtgggcactatggagctcagcactatgggaggttccccaaaaatctcgttttctatgaggaatggccaccacctgcatctcagtgatgctagtgacccctttcctactcctgtgctcactggtcctcatgaagatcctggttggtctgtagccccctatttttcctattaaagagaaattacagtaagacccatttgtgtgcaaaatcaattttaggcttattacacttggcctgataatttgcataaaatgcagcaagaattcatcggccatataggctacttttgagttaattttcctgggtttttacctaaaaatatactattttggttagagtcttgtgaaaataaccaatgtgttcaattgttttattttaaaaggctcttactgaacactataaatatgtataagttgaatatacaaactatattgtcataaaatcacaacccaaaatgtggagaacgcagagggaaaggtaaatttgctcgcaaaaacatacttcacccaaataactggaaaaaaaaaaagactttcatgacccttctttaaccagagcagcagctttcaaacaaggtgtttgccttggaaatgccattcacaagccaaacggcccttgagagctgtctgtcaggcactgtagaatctagcagctcctcacagagttagaaatagtttcaggaaagagattccctgcttttagtaactgcactttatattcccagatagcgagattgtatgtaaaccatttttatcttattctggaactcttttgggtactttttttttttttttttaaatgatggagtctggctctgttgctcaggctggggtgtagtggtgcgatttcagggtatgagaaaatgcagctggacctggctctttccaggaagaccctcacagccaaggagtccaaagcctggggttttcatctaattccagtgtgactggggtaggagcagctttggtgctgggtgtgtgtgtgtgtgtgtgtgtgtgtgtgtgtgtctatgcctgtgtctgtttagggtgttaggctcgtggttgtctagatacaaatgtcccagggctcaggagccccagggttatgtcaggggcaccagatgaaggtgtcaacagaagttagggcacaagggacaaaggtgagagcaaggttagattcatttaggtgcaagaaatcatagagggaggagggagaggaagccctcctgctaccaccgaggaagaagcgcagcttaaggcagaaagcctgtccggagaggaagtgagtttgagggcagggctctctgggtaaagtacggtctgggacaccagcctgggggaagggtacagaatgcagagtggcctggcgtggggactaagaacagaggagagcagctttcactgggagggtcagtgttttcagtgtccagcactgagcaaggtgagatttgggcagcttgctgtgaaataaggtcaggctctggcattgtccccattgcgtgtgtgtgtgaggggcactttgggagagtgaactctccacctccatcctctcatacgtccttcaaccgagcttgccagttaccctgattccaaggagatctatttattgttgacaatactggatcctagcagaggctgggtaggagcctgggcacaagcaagtggaggagggggcctgggcctgaaagacctgggaggtttgagagaggacacagcccacagaatggagcagatggggtagagtcggcaagcattcagggctcctagtaagttggacaatggagaccctgaaagatccagtaaaacggggagaacaaacaggtccccaactcacatccttgcagtgcctggagcttcagactccagacaggtggggaaggaaaattgagggatgtgaacatgttggagaatgtcgtgccctgaagaatgaagaaaaggggggtgaggaatgagagcaggaacggcttccagtgcctggtgcccaggagaactcagaaaatgggtgtggtggagaggaatcgaggaaccggaagtggtggaagtgtgcagggcccctccgagatcactgtgactgccaggcgtcctccctggctggagagcttcactgtcctccttcccagccaaaatgtgtcccttgaaagcttcctccccaatggactggttctgggtcctatatatttgaaggggtggcctgcctctccacacctgtgggtatttctagttgggtgggaggagagacagagaaaagaaataagacacagagacaaagtataaagaaacaacagtgggtccaggggaccagcactcagcacaccaagggcctgcaccggcaccggcctctgagtttcctcagtttttattgattattattttcattatttcagcaaaaaggaatgtagtaggagagcagggtgataataaggagaaggtcaatgaaaaacatgtgagcaaaagaatctatatcataattaagttcaagggaaagtactatgcctggacgtgcactcaggccagatttatgtttctctccacccaaacatctcagtggagtaaagaataacaaggcagtattactgcaaacatgtctcacctcccgccacagggcagcttttctcctatctcagagttgaacaaatgtacaattgggttttacaccgagacattcagttctgaggggcaagcaggagacagtggccttcctccatctcgactgcaagaggctttcctcttttactaatccacctcagcacagaccctttatgggtgttgggctgggggacagtcaggtccttctcatcccatgaggccatatttcagactatcacatggggagaaaccttggacaataccccgctttcaagggcagaggtccctgcggctttccacagtgtattgtgcccctggtttattgagactagagaatggcaatgacctttaccaagtatactgcttgtaaatattttgttaacaaggcacatcctgcacagccctaggtcccttaaaccttgatttcatacaacacatgtttttgtgagctccaagttgggtcaaagtggctgggtcaaagtggctggggcaaagctacaaattaacaacatctcagcaaagccattgttcaaagtacaggtctttttcaaaatggagtctcttatgtctttcctttctacatggacacagtgacagtctgatctctctttcctttccctacatatattcatggaccacagtcttcaaggagtccatttcctcactgtttttggtttgatttctctgaaattaggaaatgccccattgaggcacccaggattgtctttacttcccccagagcttccactcctgaggcaggagcttctcaaacaccccccaagactcaacacctaatttcaccctctgaaaccttcccatttcttaaatccaggcagggtcatggtccttagcccctcagatgctgtggagaccttctttccctttcatacattctctcaagattaaaagccacccctcctcagcacacaccccagagactcaccccaacatgcattgcaaatcaccctggaaacagtcataagaccacactcatttaataatattttatttatcaaaagacactctttctcaggtaagtgaagttctggagaggaaaagaggagtcctgatgtaaattgccctgcaggccttgctgagatcacaaggagattgttactgcagcttgtagcacaatagtaaatttcttctctggatggaagttcaacaatccagatcgtagtatattccttttcattatgctcagtccagcaaatgtgatgataacaaattccttttcatgatcatccattcagcagagaaaatgtttgtaaatgtgttttcatgaagatgtttaccataacatacaggatttaccattatcaatgcatccacaaactctgctgttgttttttatacataattttttccatcgagaagtgatagttgtacatattcatgctgttcatatttcaaccacaaactctgctggtttttttatacgtaattttttccattgagaagtgatacttgtacatatttgtgctgttcatatttcatgtttcatcatccttttacaataaataggttatattgtattttaagtttttctaactgtagtgcagaaattgtactgggtgtatacatagatatcaaaccaaatttacttgttctggctgataatgcatcatttatttcatagattatgtatttctttgacacatttcacgtacaactaattgcataaaaatgaattttcttttagtatagacatcagcatgtgcttaattcggaatttaattgttgagttaaacatcgtcattgccttttccgttgttattaattgctctggtgggaattttgttatctcatacataagacagtgtgccacaatatctcttaaaatttcaatggcaataaactttatatttaaaaacagggaatctatggaaaacacatttttttctaaaggattaaaatatttttttaaaataattttctaaaaagttaggcacggtagcaaacgtctagagtcccagctactcaggaggctgagacaggaggattgcttaagcctacgagttgggggctgcagtgaactgtgattgcaccactacattccagccagggcaatagaagttaaccctttttctaaaaaaaaaaaaaaaagaaagaaagaaagaaaaaaagcaacaacaccaaaacctcaccaacaaaatggtaaagaaaaaaaaaacagcaatacaatgtaagctatttgatccaaagaagtcaatgaaatttaaaacaaatgaaagggaaaaagtaatacttgagtcctgcaggactcagtccaagttctgctgtgcctccctcacggtgagccacccctttagaagtcacttgggtcataagttaacccgataggaagtgtcctggccaatgaactagggaggtggtaaatggcaccattttaaatttaaattcacggccttttcaacggatcagtagccatgttgggtaagagtgcaaatgtcagaggtgaaaagaggcagcaggaccctcccctagtgcttgggcaacagaaggtggaatcactaaggggacaagactttagcatgctcaagtacacaggacagaaaacatgctttttacaaaagctggtaaatatgaagagggaacattttcaagttcctgtaaccaagaactaccgcctgtaaccggtgaaagtgactttctatggcaaaagcgtttttgaaaaggtgaggaagttaaatatcttaatgttgggaggttcttctggtttatctggctagaccctaatggaatcccaagtgtccttatggagcggggagcagagagagagatttgagtccagacgaggaagaaggtgatgtgagtctgggtgcgggacagggggagaatgatgctatgtggggatctgggctggggaatgacttagctgcatgagcggagtgacttagactcctgaactagaagaaatctagggctcatcacctcagcagccctaaccatcaaccttatttttattacaggtcttccatcgacggactccctaaaaagccagcggcgtggaggggcgccctctattggacaaatagatcttgactactttcggccctcaaatagcctgactaggcaaataacaaataataataatttttttttaaatcatggaaaatattttaaaaaacaattaaaaagttataaatctataaaatctgcttctgtctgtgtgtctgtatatttagatgtctcatgtgtacataatgtttcactaccaaaatatatgatgaaaccctcattaatcggcttagaaaactaaacacctaaatattttctcagaaaatacaaaaactttaactcaaatcccttttaattcacctgactttaaaaatctttaaaaaataaagcatgctttaaaattattagtaaagtaaaattagaacatcttcagaatttagacatttggtttaaattatacaggtcaaatactgcccttagtaaatattttcaggtcataaacaactcctgtaatcttttaaataattgaattacatgtctgttttagagctttaagttctagctaaagcctggggacaaatgaagggcaccatgccccctctctgtgctggaaagagacattttctacagctctgacccttgcagtaggctttgcaactgctacctatcaaaattgcctacatcctaagtttattattaaaaggagttgcttggagttaacattataatgaatatatgtaactaaaactatttctcatacaaagtatatgaaaaagtagaatgtatttttaataaaaagttataaaaagacatgaacatgtagtttttataaaaaacagtaattttgtctagttttgcagttctaaaaagttatgttaaattcaaaaataaaaaataacaagacaagactcaaggtttaaataagttgtaaaagatttgtaaaaattagttctataaaaattttacaaaaaaaagcattggttaaaatttaaggaattattttgtttttacagaaattaaacattcattaaaaacactctgatacaaggccttaatttgggttcatgtatcagaatagcagggttttcttagaatattaatctattctttaaaagaactatgaatgttatgcaaactttataaaaatcttaccttagagtcaaactgattaaaattccatagattttacgtaaaattttattaaaaattaacttcaacaaaaataaaatttgattttctcctttaaacaaaagttttgcgtaatattaaataataaagcatttttgtttaccttttaaactataaacacacacacacatacacatacaccaacactaaagtcagctgacctcatactgtctttattggatattcttgtttaaaaaactatcttctttggaaaataaagttttttattttaaaccatattttaaattatcattttgactaaatccataacatacagtgatctgtaataattctattttataatatcaagtgttttgaagaactccaggaacagccatgagagaacactgtggtttagtaacactttatttcctcagtttgaaaatagttgtctttcttggggaggccggtttcagcagatgaaaacaagagtcatgatgaaaattacccagcagtggttagtgtgaccataggaacattgtcatcaggtcagcagaaaacatatcagcaaatttttctcatactggcagtgtgtaggggtggatgtttacagttcctgaagccccagtggtcgtgtggtcttttagttttgccatttataggcaacttgtggtaactagctcaattagacacattccttatcacaaggacagagggctttctgtatcctagggttcttgccttggcattccagaagaatcaggtcacacgtggacgtggagaatgagtgcaaggttttattgagtggaagtagctctcagcagatgggggagccagaaaggagattggtttctccctggattggggccgttcagcagccctggctctcctctgactgccccaggcaaaatccacatcgttctataagtcggtgccctgctggtgtgctggtgcctgttgtcatgttcctcttcatgtccagccgcctgtgtgttcctccgctgatgtgctcctctcgacgtcaagcctcctgtgtgtctgactgctagggtcttggggtttttataagcacaggatgggtcttagcaggccaggatgatcttgggaaagacaacattcggtcaggaaaacaaaaatgcctgttgtcatctaggtccgtggggacaagcccaggtgtggagcttttagccagggaccacagcctcctgtatccaacacttcccttcaccttttctatatcattcaaagggatcatgcccttcccatcccagcacttcactttcatgtcatttgccccctctgaagaggtacatctaactgccattagaatatggatgatgaccagtcttagctgcttcctgctgaaagggggcattgttttgggggaaaacggcagtcagattcctcccaggggtctctataataaaagatcgaggtggctactttcaggaggtcctctaatgtactatctggtcccaagtcccatttctgcaacctcctcctgatgtcaggagctgcctgagtaataattttatcctttaggattatctgtccctcgattgaattaggagatagagaggtgtgatttaccaaggcctctcttagcctctccaggaaggcagtgggattttcatcaaatccctggttaattatggacaacttagtataattgagaggcttggtcttagacctacgtaagccctctattatgcacacctgaaagtgtctcctcttccagtcttccatctcattattgggatcccatttagggtccttcactggtgctacttctcttccagttggataatattcgctcccttccctgatgctataggtgatgcaaagctcatccccaaatctctctgctgctggcagagcagcctgcttctcagtgtctatcaggttctgactcaaaagtaacataacgtctctccaggagagttcaaatgttagggtgaaattctggaaagcttctatatatctatcagggtcatctgaacacttgcccagatctcccttaatttgctttaagtcttgtagggaaaagaggacttggaccttactgggcccaaattcactgggcatctgtaggaggggcaagagtgagactgggcttgtttgggatgaagatttctaggaggggccaggtgagaggctgaagctggatacggaggttggggtggacccagaggagcagggcttgagggagctggcacgtcagctgggggtgcgtctgggactcgtgtctttaattccctgggcttgaccctggcagccttccccgagacagcaaacaggagggctggaacaatcctacatgtcagcaaaggtctggattgctttgcaaggtatagaaagcctgcacatttggggcctcagaccatgtgtcctcacatccagagaaaagttctaattgcaggatggtattgaaatgaatggtcccttcctgaagccaagccagtccttcctgtaaaccataatttggccaaacctatgtgcggagggctatgagatgcttttcctctggattctgagggtcaaaacagtcccaatggttcaggatacactcaaggggagtacaagctgggggtggtgaggagaactggctgcccattctgaaagacagggaatagaggtgttcctcatttcccttccttcttttggcaaaaagctcagggtgtgatggggagggaaagcaagcatcttcacttcactttccacctcttacccctgcgccctggcaaccttggcaggtgccggccacaggtacaaatgcggtatgtacccatgaagcagggagaacctggagattaggaattaactgccctcacctatgtttccttttctccctgctgttgaaaaactttgagttccctgggcctttttatcccatgaggcatggcctccttctgtgggatggggttcagtcagcaggaattggtcctgtccatttacattgtgcctgttgcctggctttgaattcctcagacctgctttctctttctagggcctcagcctgaagcttggaattgagtttgggactgaaaaagcatttcagaggctgtttatatccatttagtgcctcaaataagccctgctgaatttgcaattatcagccagcaggggtcactcctctgttaacttccctattagaaacagagcggtggggattctcacttagaaaagaaaaaaagagaaaaacagttaaagaggcaaaaagtggggaatgctgggggaagaaccccttgcttagtgcaagtgggcccctctaatccttataactttcccatccttcccccagttcagaccaggttgaattccttggccatggaaggaaaggttccattgatgcagtgggtgagaagcactctgtagggtcctggctaccatcggttttctcacacccccctcatcccaggcagtggagggagacacttctgcgacattgctccccctgccccttcatggctattgggtgtggcctttgcctgctgcaggcatgcctaggtgctggagctgggagggaaaagggtaaggagaggtgccctggaagccgctcatgcctggggctgtcaaggtggaggcatacatggcacctctaggaaaaattggtctgatttgcacctttggcggctgagccaaatgctcattttacttagtaacattgcctcagcctgtagcaaaactcttaacattataaaggaagagataagatccatttcaaataatgtgtgagagagaaaagagatgaaaggaaaacagagtcttttacctgcaggaaagggagagaagtggcagagttttggaagaaaggcaggcccaacagtttcccattcactcacactcaccttccgagatcccagacgagccaccagttgaaatgggaaaagtttccttgtccccctcacaggaggtggagtgggggtgtggcttgcttctttagtactccgctgctcaaacctctagggaagcatacagactggcaagttgtggggctacaaccccatggcagcatctaggggtagatgtttacagctgctgaagccccagtggacatgtggtaccatgtgctcttttagttttgccatctataggtggctttgtggtaaccagctcaattagacccattccttaacccaaagacagagggctttctgtatcccgcggttgttacctaggtgtaccagaaaaatcaaatcacacgtggtcttggagaatgagtgcaaggttttattgagtggaagtagctctcagcagatgggggagccaaaagggagaatagttttcccctgaagtcgggttattcagcggcccaggctctcctctggctgccccagccaaactctatgtcaatccattggtcggtggcctgccagagtgctggtgcctgttggtggattcctctcagcgtcgagagtttttccctctcaggaaagggagagaagtggcagccacccatgtgttcttgcactgatgtgctcctctcgacgtccaacctcctgtgtgtctgcctgctagggtcccagagtttttttaggcacaggatagggcatggtgggccagggtgatcttgggaaatgcaacatttggtcaggaaaacaaaaatgcctgtcctcatctaggtccaggggcacaagcccaggtttggagccctagccagggaccccggcctcctctacccatcactttccttcaccttttctgtatcattcaaagggaccatgcccttcccttcccagcacttctcttctgtatcaataggtgatgtttttaaaatttcccaactctagtgcaggcatggtactagacatatacatagaaataaaaccacacttattcttctggctggcaagacatagtatttttgccaaattatgtgttgttttgaagcattttatgtacccctggtcatataaaaataaagctattttgttcagtacaaacagcagcattttctggattagaaagttaatcatcttaaaagatcatcacggatttttccattgcactcatcactaattgctttggcaaaaaatttcttatctcacgcatgacaaaatcagccgcagtatctcctagtaatttaatggtgatgatctttataaaggaaataagcacatcaagggaaaacataattttttttaaaaaaagagtaataaaactttttaaaagtcttttttaaaagactgcttttctaaaatagtaaaataaaactccaccaataaaaccaccaacaaaacagaaaagaaaaaataatgatatgatcggagctatttgatgaaagatggtaaattaaatttaaaatgattagaagagaaaaagcaatacctgtctcccgtaggtctcagtccaggttctgctatgcctttctcctggtgagccacctatttaagagtcgcttaaagcatatgttaatccaacaacagcagattaaaaaccaatgcaatctgaactatttgatctaaaaacataaataaaatttaaaacaaataaaagagaaaaagcagtacctgtgtcctgtaggtctcagtccaagatctgctctgactcccttgtggtgagttagccctttagaagtcacttggggtggggcatatgttaattccactaacattggttctggccaatgagtcaggaaggtggtaaatggcaccttttcttcttgctgatttctttcagttcctttggagtctggacattagtcctttgtcagatgcctagtttgtgactactgtttcctatactgtgggttgtgtgtttaccctgctgatatttcttctgccttgcagaagattttcggtttcattaggtcctattgatcttattctatttttatatttttgcgtttgcttttggggcattagtcatgactacttggcctaagccaatgtctagaaaagctttttggatgctatcttgtagcatttttagactttcaggtcttagatggaagtttttatatgctttgttaaagatcaggtgactgaaagtaccgggctttgtttctcggttctctattctgttccattgctctatgtgcctatttttatacttcctgcaccatttattgaataaagtgtcctttccccaattagtgtttttgcatactttgttgaagattagttgtctgtaagcatttggctttatttctgggttctctattctgttccattgctctatgtgcctatttttatacttcctgcaccatttattgaataaagtatcctttccccaattaatgtttttgtgtactttgttgaagattagttgtctgtaagcatttggctttatttctgggttctctattctgttctattgctctatgtgcatattttataccagtatcatgctattttggtgattgtagccttgtagtataatttaaagcctgccttcagatttgttctttttgcaaagtattgctttggatatgcggtcacgtttttggttttgtataaattttaggattcttttttctagttctgggaaggagaatgatgatattttgatgagaattctactgctctgtagatggctttggagagtatggtcactttcacaatattgattctacctattcataagcttataatgtgttcccatttgtttgtgtcaactgtgatttctttcagcactattttgtagttttccttgtaggaaacttacattaacctacttggttaagtatatttctaagtattttacttattaaaaattctcagggaaatgcaaagtaaaactgaggtgggaaattaaagaaaaataaaattaaaaagaaagggaaataagctttcttgtattaagctaacttgtcccagaggcagcaacaggcacagcccagacccaggaaaagtcttgataatattatttattgtattctggagactcttccagcactccttcaatgtagggagaagaaaaacaaattttcctttgttttatggtatgagtttatagattcttgttctctttaactagtaacttcaagtattctgttttatctaagaagtatggcaaaggtcatgagaagcctgagcaggcctgaactacagctctctaggcaccatagtgaagataaaccaatgcaagcctctttagagcaaaacctagataatagacatctgggttgcatagcaacagttatgtgcaatcctgagttatgaacctgttacaatttgattaactgtctttttcctgcctctgtatccctgctttcacaccactgtaagcttgcttcaagctggcccacccccttttgtgaagtgtgtataaaagtcaagtgctgtctttgttccaggccctgtctttggacgtgagtctgctgggcctgagagcactcaataaaagattctcctgttttaacccaaagcctctctctcatcctcctaaatcccacaacaaaaccacaatgagatgctatcttaatcttgctagaagcccataatttaaaagtcagaaaacaatagatgttggcatagatgtggtcaaaagggagcactttgacactgctagtgggaatttaaactagtccgaccactatggtaaacagtatggggattccttaaagaactaaaagtagaccattcattccagcaatcccattactggctatctacccaaaggaaaagaagttattccataaaaaagacacaagaatatggatgtttatagcagccgattcgcaattgcagtgatatgggaccaacttaagtgcccatcaacgaacgagtggataaagcaaatgtggtacaccatggaataatacttgataataaaaaggaacaaaataatgtcctttgcaacaagttggatggaactggaagccattattctaagtgaagtaactgaggaatggcaaatcaaatattgaatgttttcacttttaaatgagagttaagctatgagaatgcaaaggcataagaatgatataatggacttggggactcagggggaaaggttgggagggggatgaggaataaatgatgacatattgggtatattatacactgctcaggagacagatgcctcaaaatctcagaaattaccactaaggaacttttatccacataaccaaaaaccacatatattccacacactattgaaagaaacataaacattattttaaaaaataaagccacttttaaaattagcaaaataaaataaatatgtcttcagagtttagatattggatccaaattagacagatcaaatactgcctttactaaatattttcatgtcattaacaacttctaaaacctttcaaacagttttttgacatgtcttggaaccatccatttctagctaaggcctgggcacctgtgaaatagggccatgcccccccttatactgggaagagtaagatatttcaagactaagatgttttctacagctccatctttttctttaagctctacatcaaggacataattaaaattggttgtctcctaagtggtttactaaaaatgcatacttaagagttaccattataattaatatttgtatctaaagctacttaaaaattttcacacacaaatctgactgaacaagtaaaatatattttaagtcaaagtttataaaaggacatgagaacatagcttttatgaaaaaattagttttgtcaagtttagaggttttcaaatattttaaattcaggaaataaaataacaaaaagacaaaagaaaatggttgaacaacttagaaaaggtttgttaaaattcatcttataaaacaatctacatgtaaaaagtgggctaaaatttgaaagagattatttaggttttccataaattaatccagaaggggtaggaagtcttaagaatgaggaaggacaggaggaaggggaggtcatcctgacactgcagaggcagaagtgcagctgaaggtatgaaggctaagaggggaggggagtttgagtgctgctgcctggctgtcagagcagaggagggtcctgggcaccagacttgaggaagggatgaaaatgctgggcagacctgtagtgggcccttgagatggcagatagtggtttccagagagagggccattgttttccagtgcccagcactgagcagagagagttttgggcagtgtaaaaaaaaaaagagaacttacctctttctcgttttagaaaaagaacagtctaagaatatcagcagggaaactctcagtgcttcaaggggttaaacgcccttttggctttcttgtgttggtttcatcatagaggaggagaaacttcttggaagtgttcctaaaaacacaacacgtctgcttctcctttcaaaaaaggaagtgctaaaacacgaacactctagatccaaatattaatacggatgtctaaatgcttccgttttccaaggggcagaaagctaaaggttgtaacctattcatttcagtcaaagttggtgaaagggaagcaaaggaactgggtggggcttggaaggatgacgaagctcaagctcattggccagcaacctctctcctgggggcgggaggggtgagcatacgtcattgctttggcttctataaaatgaggaggactcaccgagtgtgaagagtccttctggtgattgcagctgagagcacactcacgacgttctgcaaggattctctgattatgattctgaagggaaaagcgatggaatggacagcagagattgtaattttctttatcttgaattacggaagaaagtatctaggacagaaatccacgacaagtccttggaaccagcagatctcttcgttcacggagacgttgacgtattctctattgaagaagattcttaccttcttactggacaaggttttgtcagttctgcgtgactggattgtccgggagactctgaggaaactgatgtcacatgtttttccaaagaagatgtttctggaaccaacaactgtgattgtggtttgaggacttctgagagttccagtacaggaaataagcagaacatcagctggaggctaaacggatccagacttcactcttcacttcccttcctattcagtctattgtgcctgctgactgagaagcttggctggtatgtgagcaaataaacggaactattcagaaggagatgttgacatattctgtattgaagaagatccttatcttctcacctgacaaggttttgtcagttctgtgtgactggattgtccggaagactctgaggaaactgatgtcacatgtttttccaaagaagatgtttctggaaccaacaactgtgattgtggtttgaggacgcctgggagttccggtatgcgaaataagcagaacatcagctggcggctgaagggatgcagcctccactcttcacttcccttgccattccatctattgtgtctgcctgactgagaagcttggctggtatgtgaggaaataaacggaattataaacaaggagattgtttctcatctacttcattctgttgtggcttttctattttggggttcagggtgtgtgacaaggaccaaggagatgaaaggtttcatgatggagaaagcccaggcaatcagattgaagagctatccacagggaatcttggctgctgaggggctgcaccctgcaacggactgaccatatgacagaaaagggttttaaaggctcaacttctggactgagaacccagagtaatttgggaacctcctctgtgaggagatatgaaagctgggaatcatgacatccctaggaatggaaggcacatttcctgatggaaggggtgctttggaaaacaggagcagagtagacacagcagccttgtggatacgggtgggcagcatgcatgggtgatgtgaacgtggagtgtttgtgatcgaaactcaaaatgtctgacaaagtgaaaacctagaaaccacaatgaggaggaagagtttgtgagggcaatcactctccccatgtgtgaaaatcgggggctcttaaaatctcatctggagaggtgcagtctaccaaactctgggactttagcctccccttttaaaaaaccgtgcatcaataccaacgtccgaaaccacagaaataacacctggcttgcatggagacaaggacaaaaagccgtcatgatgagttgttctgctcacttgctgcctctgttcagtgcacaggatattgtccacccactagcaggctactgcaagagaagtgtgcaatatgttccctatgtgccatatatgtgccatatggcccatatgacaactgagtcagaaaatatctgatgccctcagagttacactccacctggagcttgcccccagccatccaggacctaggctccctaccctgtccaattttctggtgttttgggggcttcattctctaaggtgtgcccactctttactcaaaccaaaacacccacatattcctgcccatgaacaaccaatcaaccacttctcagttccacatcctgctgttgggtctctagtggtgacactgtaactcccaggtcatagtggtgacactataacacctagctaaattgatgccttgtctctaggaggccatgggctcctgcaggtctcatctgactctctgtagccttccctgacaatgctcacaatacccaagccagagccacattgacagcaagctgctctcatcttacctttgccagacctggccactggaaaaggctgaccctcatcctgcaatgcctatacctccaacctttgtctcaagctggtgtcctggagggacttctaagcagaaaacagattcagactcccatcctctcctgaatggcctcatatccaattctcagaccctcagccttcattgtaaggacacttcatccatgcccttgagtattctgtctgcactgtgtattctgcaatagattctcctccctctgcgaccctcaactccttccgcagactttttgttttcttgatcatctaccatagtcttccactgggacactgccaagcccattctggagagtgagttgtgcaagtacactgccccccatctacctttcgggaggtgtatacacccttctttctcccaggtctggaggctttctattttcatcctgaggcatctccacctgctcttggattcttcaaattgacaaccaccagttaacaagaactatgtgtcaccaaatagccaaacaatggcaattacaaaaataaaattaatagctgtaacccccattagcaaggatacacaaatcaaatcagggatagtgggtgaggaagtctgcctaacattcaaggaaggattctgaagtgatacaaaatcattgcctttgctatctttagaatggacactttcagccaggcacagttgctcagcctgtaatcccagcactctgagagccccagttgggtggatcacttgaggccagcagcttgagaccaccctgggcaatgtgcagaaaccccaactctactaaaaatacaaaaatagccagttattgtggcacatgcctgtaatcccaactccttgggaggctgaggcacaagaatcacttgaatctgggagccagagtttgtaatgagcgaagatcatgccactgcactctagcctaggcattagagtgataatctgtctgtggaaaataaaaacattcctcttcaaagttttcttctttaaatcataaatgttggaattaatatatcctctttgaaactcactttcttcaagcttctttatttgatggtagtaaatctttgttaagctttatgaggcaagagtaatggaagaagcatattatatatatttatactctaacctcagtgcttgttctagcaagctcaggcatgcgtgaatgtgcccaggcatgttccagcccataccttatatcctttccttattgggaaatgctgttactcctataagcattcttgtaagcaacttcctctttttctttgtctccactatctttacctattgaggacagttttaggttcttagccagttggatgtagcatagactgtgaggtccaaccccagccaatggagatagcacacagcagtagcgacctcatgcttaacagataaatattcctgtctccctttgtttggggtgctctcagctgatgagcaacaccctttctaaagaaattaaagttgtcttgctgagaaaacttttggtctaaatgctgattcttccttgcagcactgaagaagaagcaattatttccaacactttctcatacacaaaaaaagaagaaggtggaagaaaactttcttgtgcaccctatccctcactcagaaagacaacagaaggctcctagtggcaagccctagaggattcatttcttttgggaaccctcttggctgggatactaggactcaggtcaaactcagcattttcagtgtgtgggaagtgtgcttgggtttcactgttacttccaataatgtgatttggtccttggggttcaccaaattttggtatggagtggtgaaccctgttaagtttaagtgtctataaaattaacaaagcaaaataaccattctgccccatggttcagagaccaaatattgtgtaggaaatgctttagcgagagaaacagagaagaataaaaaatgtcctcaagcgctgcattatttcttgttatcgtccagatcttagaggaaaggctttcattttccctcattcagtatgatattagctgtgcatctgtcatttatggcttttattatgttggggtatgttccctgtgtatgtagttttttcagggtttttgttatgaagtgatgttgaactttatcaaacgtttttcagtttcagttgaaacgatcatatgctttttgtccttcattctcttgatatgatgcatcatgttgatgatttccatatggtgcactgtccttgcatcctgggcatgaattccacttgatcatgacaaatgaatttttaatgcattcttgaattccgtttgctggtattttgttgaggatttttgcatcaatattcatcagagatattggcctgcagtttctttttttttcttttttctttgttttgttgtttgtttgtttgtttgttttgatgtgtctatgtctggttttggtatctgggtagtagtgttccatccccttttattttttagaataatttgaataagactggtgttggttctttaaatatttggtagaattccgaagtgaagtcattgggccccgggcttttctttagtggaaggctgtttattatggcttcaatctcgttacttattattggtctattcatgttttgaatttgttccttatttaatcttggtaggctgtgtgtatctaggaatttgtccatttcttttagattttcaaatttattggcacataattgcccattgtagcctctaatcgtcatttgagttcctgcagtaccaattataatgtctccttcttcatttttgattgtatttatttggatcctgcccctttttttcttacttaggctgcctaataatttcttaattttgttgaactttttcttttgtttgtctcgctctgccaccaggctggagtgtagtggtgtgatcttggctcactggaacctccgtctcccaggttcaagcaattctcctgcctcaccctcccaaatagctgggactacaggcaagtgccaccactcccagctaatttttgtatttttagtagacacgggttttcaccatgttggccaggatggtctcgatctcttgacttcataatccacctgcctcagcctcccaaagtgctgggattacaggcatgagccactgcgcccagcctaattttgtttaaattttcaagaaatcaacttcttctttcattgatttctgtattttttatttccattttatttatttaaactctaagctttattctatcttcttctcattttagctttggtatgcttattgcctctctagctctttaatgtgcattgttagattgtttatttgaagttcttcctctctacaccataagacgtaagcatgtcctcattatgtcataagatgtaaccacttacagctataaacttccttcttagttctgcttttgctgtatctcataggctttgttatgttgtgtttccattatcaattgtgtcagaaatttttcaatatttttcttaatttcttcattgagcaactgatcatttgggagcatatttttaaacttccatgtacttacatagtttccaaaatacctcttgtgatcaatttctagttttattccactatggttcaagaagatgcttgatattatttcaattttttttcacattttaagatgtgttttgtgacctaacatatggtctactttttttttttattaaactttaagttgtggggtacatgtgtagaccgtgcagttttgttacataggtatacacgtgccatggtggtttgctgctcccattaacctgtcatctacattaggtacttctcataatgctatccctcccctaacctccaccctctgacaggacctggtgtgtgatgttcccctccctgtgtccatgtgatctatttttgagaatgatccatgtggattagaatgctgtggaaaagactttggattcctaatatccagggagggagacgatgatattactttcaatatcacacgggtgtacacactctctgtgacattgttcctaatatccagtggaagagaggatgatataacacccagggagggagaggatgatattactcttaatattgcagggtgtgtacccatgcctatgatattgttcctaatatcaggagggggagaggatgatattactcagaatatggcagggggtgtacacacactctgtgacatggttcttaatatacaggggagaatgggacaatattactctcaatatcgcagggggcgtacaaccctgtgatttgttcctaatatacaaaaggggacagtatgatattgttcctaaaatcgcagaaggtgtacaacgccctgtgatattgttcctaatatccagggcgggagaggatgatattacccccaatatcacagggggtgtgcactttccctgttacattgttcctatgatccgagtggggggaaatgacattagtcccaatatcgcaggatgtgtacactactcccccatgatattgttcctaatatcaagggggagagaggaggatattactcccaatatcgcaagggaggtacatcctccatgcaatattgttcgtaatattcaggaggagagaggaagatattactctcaatatcgcagaaagtggacacccaccctgtgatgttcttcataatatccagggaagcagacgattatatgactttcaatatcgctgggagtgtacatcccttttgggatattgtttctaatatccaggaagggagaggattatattacttccagtattgcagccagtgtacacatttcttgtgatattgttcctaatatccagaaagggaaaggatgatattactcccaatattgcaggtggtgtacacccccctctgatattgttccttacatcaaggaaaagaaagaagaatattactcccaatatcgaagagagtgtacacccctcctgtgatattgtatttaatatccatggggaaagaggatgttgttactcccaatatcgcagggggtttacacccacactgtgatattgttcctaaaatccagtgaaggagaaaataatattgctcccaatattgcagggtgtatacaggccctcccccgttatattgctcctaatatccagcggtggagaggatattactttcaatttttgcagggagtgtgtaccccctctctgatatttttctaatatcaaggatgggaaaggatgccattactcccaatatcgcaggaggtgtacatgccctgtgatattgttcctaatatccagggaggtagaggatgatattactttcaatattgcaggggctgtacaccctctatgatgttgttattaatatttaggttgggagaaaatgatatttttcctaatatcctgggaaggaaaggatgatattactgtaaatattccagggagtgtacaccttcctaatattctaatattgttcctaatatccaggggtgggagaggattatattactcccaatatcgcagtgggtgtacacccctcctgtgatgttgtttctaatatccaagcgaggagaaaatgatatcactctcaataccgcagggggtgtacaccttccccatcatatcgttcctaatattcagagggaaagaagatgatgttactttcaatatcgcaggggttgtacacaacccctgtgatatttctcctaatatccaggaagaaagaggatgatattgctcccattatagcagacggtatacgcctccctgtaacattgtttctaatatcaagactgggagaggatgatatcacttccagtatcgcaaggggtgtacacctcccccgtgatattgttactaatatccagggggaagaggataatattactttcaatattgcaggggctgtacacccccgtgatattgttgttaatatttaggttgggagaaaatgatattagtccaaatatcgcagagagtgtacacacttccgataatattgttcttaatatccatgggggagacgatgatattacacccaatatcgcagggggtgtagtctccccttgtgatattgtccctaatattcagggaagtaaacgatgatgttagtgtgaatattccagggagtgtacaccccctttgtgatattgtcctaatatccgcaggagagaagataatattactcccaatatcgcagggggtgaacacaccccctgtgatattgtttctaatatccaagcgaggagaaaataatattactcccaatgtctcaggggatatacaccttccctatgatattgtttctaatattcaggtggaaaacgggtgatattactcctaatatccaggaagaaaggggattatgttactccccttatagcagggggtatacacctcccctgtaatattgttcctaatatcaaggctgggatatacgtggggggaaggatgatattactcccaatatcacaggggttataaaaccttctgtgatattgctcctaataaccatggcggaagaagatgatattactcctaatattgcaggaggtgtacactcccccattatgttgttcctagtatgcagaaaaggagaggatgacattattgccaatatcgcagggtgtgtacaccacccatgatattgttcctaatatttagagggacagaggatgatattactcccaatatcgcagggggtgtacacgcatcccctgtgatattgttcttgaaatcgaggggaaagagaattatatttctctaaatattgcagagggtgtacaccgccccctgtgatattgttcctaatagccgggggcggggggagataattaaattactttcaatatctcagagagtgtacatcccccttgtgacattgttcctaatatccagagcaaaagagaatgatattcctcccagtatcgcaggaagtgtacatttaacctgtaatattgtttctaatatccagggggaagagaatagtaatactcccaatatcgtaggggttgtacaccttttctgtgatattgttgcaaatatttagaagagagagagaatattactcgcaatatcacagggaatgtatacttcccctgtgatattgttctaatatctagaaaaagagaggataatattactcctaatattgcagggggtgtacacccccacttgtgatattgttcctaatataaaggaaggtcgaaaaacaaacggggagcccagggggaaggaaggcaggcgaggaagaggcagcgccggggcgccggagggagcagccgggccgcggaagcgcgagcacgagaccggtcgcggtcgcagtcgcatttttgccgttgtcgcggccgccgccgccgaggcttacccggggatgtctgagcccgcgcctcgcggcccccaagctccacgctgcgcccgctgtcccggcctctaagggccgccacgtccctgcggcgcgcgcaggcagaaagcggcttcgtgccggcggagggggcccgggcgggccgggaaaggctgccccaggccccgcgcctaccccatcaccgcggccggcgccgggccgggaggatgagcggtgtggggctctgaagcatggagggggttttgtacaagtggaccaactatctcacaggttggcagcctcgttggtttgttttagataatggaatcttatcctattatgattcacaagatgatgtttgcaaagggagcaaaggaagcataaagatggcagtttgtgaaattaaaggtgacagctttggaggggaccacccttgattggatacataaattctgttcattcagcagacaacacaagaatggaattaatcattcctggagagcagcatttctacatgaaggcagtgaacgcagctgaaagacagaggtggctggtcgctctggggagctccaaagcatgtttgactgatacaaggactaaaaacgaaaaagaaagaagtgaaaccagtgaatcgctgaaaaccaaaatgtctgaacttcgcctctactgtgacctcttaatgcagcaagttcatacgatacaggaatttgttcaccacgatgagaatcattcatctcctagtgcagagaacatcaatgaagcctcttctctgcttagtgccacgtgtaacacgttcatcacaacgcttgaggaatgtgtgaagatagccaatgccaggtttaaacctgagatgtttcaacggcaccatccggatcccttagtttctcctgtgtcaccttctcctgttcaaatgaggaagcgttctgtcagccaccctggttcttgcaccagggaggagtagccactgtataaaagaaccagtatctgcacttcaccgactctcccagcgacgccgaagaacctactcagatacagattcttgtagtgatattcctcttgaagacccagatagacctgttcactgttcaaaaaatacacttaatggagatttggcatcagcaaccattcctgaagaaagcagacttatggccaaaaaacaatctgaatcagaagatactcttccatccttctcttcctgaagaaactgtagtgtccaactttctctaagtattgctatgcaaaagctgctgtaattgaactattgttatagggagtagttttttcccttaggactctgcactttatagaatattgtaaaacagacaaacaagaaaacaaaccacatacttttgaagcgtgttttatctttatatagtttgtttgcaagagtattttcctaataacttcacagtatgaatgtgcatcttttttttctttttttaacaaatgatggtgtaacattttgacatccataaggacaaatgtagatatttttctaaaaaaccgtgaggggactgacagcttggtcagggtgtattgtagcttataaacatgaaatcttacaaggtttcagtttgacagaagtgtgatatatgtaacttgtgccatggaccaaatggtcactttaccacagctaaaaatgagttatgatagcagcttgatggtgattgcattgtattcctttaatcaaaaaggaaacgcaatattctaagtatctttagcccaaataccatgacatattgagcatctttaaataaccagactgtattgtccttcatatgtgaagttgacactactgatttgtcaataccaaattttgggttaaagtgtttaatttttatttatttattttcttgttgcctcaaaagatgattgcattctaacttttgtgacctaccaaatttaagatgtgtatacattgttctttacgttgttctagaaaagagattttaatgctgtagtgacttagctcacttacatcagagaaataaacaactttcaatggaaaaaaatatatataaaggaaggaagaggatgatattacttctcatatagaaggggttgtacaccccccttgtgatattgttcctaatattcagggagggagaggattatattactcccaatatagcagggagtgtacacccccccccccgtgataatgttcctaatattcagggaagcagaggatgatattactttcaatatcacagggggtgtgctgtccccctgttatattgttcttaatattcaggggggagaggatattattatgcccgatatcacaggagaagtacaccccacaagtgatattgttcctaatatccaggggtaaagaggatgatatcgcaggtggtgtacacccctccccgtgatattgtttctaatataaagaaggagagagcatgatattactcccaatatcgctggaggtctacaccccccttgtgatactgttcctaatatccaggaagggaaacaatgatattgctgtgaatattccagggggtgtacacccctttgtaatattgttcctcatatccagggggtagagaggatgatattactcccaatatcgcagggggtgcacggccccactgtgatattgtttttcatatccaggaggggagaggatgacattactctcaatatggcagggggcgaacaccccctgtgatattgtgctagttaggttgggagaaaatgatattactcccaatatcgcagggggtgtacaccgctcctgtgatattgttcctaatatccatgacgggagaggatattactcccaatatcgcagggggtgtacctctcccctgtgggattgttcacagtatccaaaagggaagaggatgatgttactcccaatatcacagggagtgtacaccaccattgtgatattgttcctaatagccagggaagaaaacgatgatattattgtgaatattacagggggtgtacacaccccctgtgatatggtttttaatatacaggttggaaaaggatgatattactcccaatatcacaaaaggtgtacacacccccccatgatattgttcttaatacttcggtggggagaaaatgatattagtctccatatcacaggggtgtgaactcctccggtgatattgtttttaatatcaagaggggaggagatgatattgctttcaatatcgctgggggtgtacatccctcctgtgatattgttccttatatccaggcgaggggaaaataatattactcccaatagtacacaccccatgtggtattgttcctaatactcagggggaaagaagataatattactttcaatatcacagggtttgtacacctttcctgtggtatagttttcaatatccagggggaaggtacatgatattactcccattgcagcaaggggtgtacacacctcctgtgatattgttcctaatatccagaagtggtgaggatgatattactcccagggggtgtacaccccacctatgatattgtttctaatatccaggggaaaagagtgtgatattatgcccaatatcgcagagggtgtacacttatcctgggatattgtttctagtatttggggagggaggagaggatgctattattctcaatatcgcagaaattgtacacccccgctgtgatattcttcataataatcagggaaaaagaggatgatattactaccaatattgcagggggttacacttcccctttggtagtgttcctaatatccaggaagaaagaggatgatattaatcccattttccaggaagtgtacacccaccgtgtcatgttgttcctaatatccagcagggaagaggatgatattactcccaatatcggagagggtgtacacttcccctgttatattgtttctaatacccagggggaagaaggatgacattactgccaatatcacagggtgtgtaccccaccctgctattgttcctaatattcaaaaggaaagatgaaaatattactcccaatatctcagggtgtgtacacctctcctgtgatatcgttcctaatatccacaggaagagagaatattactctcaatattgcaggggggtgtacacccccctgtgatattgttccaaatattcgggcggggagaggatgatattagtcccaatatcgcagggggtgtgcaccaacctgtgatattgttcctaatatccatgcgggggaggacgatatcactctcaatgtcgcaggaagtgtacacctctcttgttatatttttcttaatatccaggagggaaaagatgatattactgccaatatcgcagggtgtgtccaccccccttttatattgttcctaatatccaatggaaaagaggatgacattgctctccatatcccagaaggtgtacaacgcccctgtaatattgttcctaatattttgggggaagagaggatgatataacttataatatcacaggaggtgtacaccacccctatgtattgttcctaatatcctttaagggagaggatgatattactcccaatatctcaggtggtgcctattccccctgtgatattgtttttaatatccaggggaagagagtatgatattacgcccaatatcgcagggggcatacaccctctctgagatattgttcataatatatagagggagagaggatgatattacttccaatatcagaggtggggtacaccccccggttatattattcttgatatccaggaggggagaggttgatattactggatatatagcagggagtgttcacatcttctgtgatactgttcctaatatccagaaaagtagaggatgatattactcccaatatcgcagaacgtgtacacctccctgtgatattgatcctaacattcaaaggggagaggatgatattactcaaaacatcacagggcatgtacactcccctgtgatattgttcctagtatccagaagggagcaagataatattactttcaatatcgcagggggtgtacacccctctttggtatgtttcctaatatccagaaggaaagagggtgctattactttccatattgcaaggggtgtacacccccctgtggtatggttcataatatccagggagggaaagggtgctattattccccatatcgcgaggcatgtacaccctgctgcggtacggttcctaatatccagggggaaagaggatgctattacttcccatatcgcggggtgtgtacacccccgtgtggtatgttttgtaatctccgggaacgaagagggtgttattacccctcatatcgctggaaatgtacactcccctgtggtacggttcacaatatccaggggattgagggtgctattactccccatatcgcggggggagtgcacctccctgtggtatggttcgaaatatccagggtaagagagggtgctattattccccattttgcaggaggcgtacacccctctatggtatgttttgtaatatcccaggtaaggggtgctattgagagaagagagcaaaagaccccccccatattgttctgtattattttatactcagtacctgttttaagaagaaacaaggaagcgaaaccaaaggcaggcagcccggcgccaggcaccagatccaaaaccagacccgaaaccaggcctgggccttcctgaccttagcctgaaagttaaaattcaacccatgacctagcaactgatgttatccatagattccagacattgtatggaaggacattgtgaaatttcttgttctgttctgtttcactctgagtactggtgcatgcagcccttgtcacatacccactagattgctcaatcaatcatggccctttcatgtaaaaaccttagtgttgtgagcccttaaaaaggacagaaattgtgcactcaacaagcttggattttgatactctagtctgctgatgcttccagctgattaaaagccacttccttcactacctcggtgtctgtgggattttgtccgcggctcctcctgctacactgtgactccccttatagagaggggtgtacacccccctttggttcctaatatccagcgggggagtaggtgctattactccccatattgcggggagtgtacacccccttgtagtacggatcgtaaaatcaaggagggagagaaggtgtaattatccccatatcacagggagtgtacacccctttgtggtatagtttgtaatatccacgacgggagagaatgctattactccccatatcgtggagggtgtacaccgccctgtagtatggttcgtaatatccggaaggggagaggttgctattactccccatatggtgggaagtgtacacccccatgtgatatggttcataatatccaggggggtagaggatgatattacccacaatatcatagaaggtgcacacccttttgtgatattgtccataaaatccagaaggggagaggatgatattacttccaatatcacagggggtgtgtagccccatatgatattgtttgtaatatcaaggtagggagaggatgctattccttacaatagctcaaggggtgtaaccttcttgtgatattgtttgtaatatccagaaggggagaagataatttttttattttaaaagtaaactttaatgtcaaaaatgcaaacttgagaagggcagaaagatcaaacagaaggctgccacttcacaattggagggttgcacagtggccgggcagaggcgctcctcactccccagacggtgaggcagccgggcagaggtgctcctcacttccgagatgttgcaggagccgggcagaggtgctcctcacttcccagaacagggggctgccgggcagaggtgctcctcactgcccagacggtttgcaggcctggcagaggcactcctcacttcccaaacggagcagcggcaagccagaggcgctccacacttcccagatggtggggcagccgggcagaggcgatcctcacttctcagagggtagggcggcccagcagaggcgctcctcacttcccacatggtggggcggcaggctagaggcgatcctcacttcccagacggtggtgtggccatgcagaggtgctcctcacttcccagatggtgtggccgccgagctgaggcactcctcacttccctgacagtggggcggctgggcagaggcgctcctcacttcccagacacttggactccgggcagagactctcctcatttcccagatggtggggctgccgggcagaggcgctcctcacttcccagacggttcagaggccgggcagaggcgctctggggagaggataatgttactcccaatatcgcagggggtgcacactccctgtgatattgttccgaatatccagagggggaaaggatgatatagctcccaaaatcgtggggagtgtacacccccctgtgatcttgtttgtaataccaagaagaaaagagaatgctattatttccaatatagcagggggagtacaaccccctgtgatattgttcgtaatatctagggggagagaaaattatattagtcttaatatctcaggggacgttcatccccctgtaatattgttggtaatattcagaatggagaagatgatattgttcttaaaatacaggaaaaaatatgataatattacttccaatatcgaagggggtgtacactctcctgtgatattgttcccaatatccagaatgaaagaggatgctattactcccaatatcccagggagtgtacacccctttgccatattgttcataatatccaggggaagacaggataacattactcccaatatcaccgggggtgtccacccactagtgatatttattgttcatcatatccagaaaaggagaggatgatattactcccaatattgcaggtggtgtacggtccctgtgatattctttgaaatatctagaaaaggagaggatgatatcactccgagtatcacagggggtgtacacccccctgtgatattgttcgtaatatccaggggagaaaaggatgatataattgccaatatttcaggggatgtgcacctccctgtgatattgtttgtaatatccaggggtggagaggatgatattactcaaaataacgtaaacatcctgtgtgtacatcccctgtgatattgtttataatatccaggggggtagaagatgacattacccccaatatcacagagtgtacacacccctgggatactgttcataatatccaggcgggaaagaatgaactacttccaatatcgcaggatatgtacacccccctgtgatatatttcctaatatttatgtgggtaaggatattacccccaatatcacagaaggtgtacatcctctttgtgatattattcctaacatccaggaaaggagagaatgatattactcccagtatcgcagggggtgtacaccacccctgtgatattgttgctaatatccagggggagaggataatattactcccaaaatcacaggggacgtacactcctcctgagatattgttcctaatattcatggggaaaagaatgctactactccaaatacagcagagggtgtacaccatccccgtgatattgttttttatatccaaagggtgaaaggctgatattactcccaatatcgcagggggtgtacaggccccccatgatatcattcttaatatccagggaggcaaagaatgatgttactcccaatattgcaggctgtatacaccccccgtgatattgttcctaatatccagagtaagagaggatgacattgctcccaatattgcaggggttgcacgcacgccctgtgataatattactcccaatatcaacagtgggtgtacactcctcctgtgatattgtttgttatatctaagaaagaagaggatgatattactgtcaatatcacagaaggtgtacagccccttgtgatgttgtttctaatatccagcggtgagaggatggtattactcgcaatattgtagggggtgtccaacggccctgtgatattgtttctcatattcaaaaaggaaaagaataatataactccaaatatcgcagggtgtgtacacttccctgtgatattgatcctaatatccaggaagagagaggatgatattaatcccaatatcacagggggtgtacatcgcttctgtgatattcttcctaatatccagggggggaggggatgctattactcttaaaatcgcagggaacttacactcccactatgatatttttcctaatatccaggaagggagaaaatgatattactcctaatatcacatatcacaatgggtgtacatctccccgtgatattgtttctaatatcaaggatgggagaaaattatattactctcaatatcgcagggggtgtgcacacctcctgtgatattgttcctagtatccagcggaggagatgatattactttaaatattgtagaaggtgtacaacccccctttgatattgttcctaatatccagggggaaaggagatgatattactcctaatatcgcaggggctgtacaaccctatgtgatattgtttcttctaatatccaggggtggagaagataatattactcctaaaatcgaaggggacatacactccccctgtgatatttttcctaatatccagaaggaaagaggatgatattactcctaatattacaagaaatgtatacctgtcctgtgatattgttcctaatatccagaggggtaaatgattatattactcccaatatcgcaggggtgtacaccttccctgagatattgtttctaatatgcagtggaggagaggatggtattactcccaacatcacaggagatgtaaactccccttgtgatattcttcctaatgttcaggacgaaggagggtaatattactcactgtattgcagcagggggtgtagagccccctgtgatattgtttttaatattcaaggttggagaaaataatattccttccaatatcgcatggggtgtacacccttctttttatatagtttctaatatctggggggagaggatgatattactcccaatatcgcagggggattacacccccactgtgatattgtttttaatatccagggtgggagaggataatattactccaaatatcccagggctatacaccctccgtgtgatattgtttctaatatccagaggaagagaagatgatattactcccaatgtcacagggtgtgtacaggccttctttgatattgttcttaatatccatgagggagaggatgatattactcccaatatcgcaaagactgtacaccctttctgtgatattgcttccaatatccagggagggagaggatattacactcaggatcacagggggtgtacaccccaacctgtgatattgtttctaatatctagggaaaatgagggtgatattactatcaatatcacaggaggtgtacactcccttatgatattgttcctaatatccaggagaatgacaggataatattactcccaatatcgcgggtggtgtctccccccactccgtgatattgttcctaatacccagagggggagagaatcatattactcccaatatcgcaggggatgtacacctacatccggcggagtagaagataatattactcacaatatcgcaagaagtgttcaccttccctgttatattgttgctaatatccagggagtgagaagatgatattactttcaatactgagcgtgtacactacccctgtgatattgtttctcatatccagtagaggagaaaatcatgttactcccaatattgcaggggtgaacacctcctttgtgatatttttcctaatatcaggaaagggagagtatgatattacccttaatattgacaggggtgtacacccccctttgatattgttccaatatccaggggggcagaggataatattattcccaatatcgcagagggtgtacaccccccgtgatattgttcctaatatccagagaaataaaaaatagtattatttccaatatcacagggcgtacattttccctgtaattttgttcctaatatctggggggtggggtggcaggataatattactctcaatattggagagggtgtacacccccctgtgatattgttcctaatattcagggtgggagagaatgatgttactcccaatatctcaggagtcgtatacacccccttgtgatattttttctaatatccaggaggcagaggatgatattgctcccaatatcgcagggggtatacacccgagctgtgatattgtttctaatatgcaatatgggggaaggatgattttactttcaatatcgcagggaatgtacactttccttgtgattttgttcctaatatccaggggtggagaagatgctattactatattactcctcatatcgcaggcggtgtacaactccctgtgatatggttcagaatatccagagtgaaaaaggagggtgacattactcccaatatcgggggggtgtacacccctttgtgatgtggttggtaatatccaggggggcagatgagggtgatatcactccccatatcgtggaaggcgtccacttttttgtgatgtggttctttatatcccgaggggagaaggtgatattactccccatatcgcgaagggcatacacccccctgtgatatagctcataatattccggagagtggaggaagatactatgccctatatcgcgggtggcctacaaccccctatggtttggcttataatatccaggggggagagggtaatattgctccccatattgtggagacgtacagccccctgtgatatggtttgtaatatctttggggggcgagggtgatattactccccatatcgcggggagcatacacccccgtgatctggttcatagtatctcaaaggaagaagttgatgtgtacaacttaagggaaaaagttgaagtgaagtgtacacacgccctgtgacgtggttcataatatccaggcgggggagaggagagtgatatttactccccatatcgcgggtgttgtaaactcccctgtgatatagttcataatatccaggggagagaggagggtgatattgctcctcatatcgcgaagggtgtacaaccccctgtgatatggttcataatatccagaagggtagaggacgatgatattactccacatatcttgggaggtgtgatatggttcgtaatatccagcgatgagagaatgatattactccccatatcgcaaaaggtgtgatagggtttgtaatatcctgagggggagagggtgatattaatccctatattgcagaaggactacaccctcccatgacatggtttgtaatatcccagggggtagagtgtgatattactttccatatcacagggggtgtgatatgattcgtaatattcgaagggggagagggtgacactactctccatatcacggggtgtgtgatatggttcttaatatcccaggggttagaggttgatattaccccctttttggggggtgtgtacaccccctgtgatatggttcgtaatatcccgggggagacagggtgacattattccccatatcgaggggatcgtacaccccctgtggtgtggttcataatatccctagggggagatggtgatattactccccatatcagggggcgtgcactcttctgtggtataattagtaatatccagggggcagaggtcgatattcgtttccatatcatgaagggagtacacttccctgtgatatggttcctaatatccaggggggagagggtgatattattccccatattgcggggggacatacaacccctgtgatatggttcataataaccagaaaagaagagggtgatattaatccccgtattgcagagggcatacaccccccctgtgatatggtttgtaatatctaggggaggaaaaggtgatattactttccatattgctgggtgcagacacccctttatgatatggttcataatatccaagttggagagggtgatattacttcccatatcatgggaggtatacccttccctgtgatatggttcgtaatatccagaaggggagagattgatattactccccatattgtggggggcgtacaccttcctgtgatacggtttgtaatatctaggggatatagtgggtgatattactcaccatatcacgggggttgtaacatggtttgtaatatccaggggaggagagggtaatgttactccccatatctcggggcatgtacaccctcctgtgacatggttcgtaatatccaggtcgggagagggtgatattactcctcatattgccgggggtgtgttatggttcataatatcctggggaaggaggctgctatcactctccacatcttgggggatgtacactctcctgtgatatggttcataatatccagggtgggtgagggtaatattactccccatatcgcgggaagtgtacatacccctgtaatattgtttgtaatagaagagagggtgatattactccccacatcgcgggtggtgcccacccccctgtgatatggtttggaatatccagggggatgaggagggtgatattactccccatatctcggtgggagtacatccctctttgatcaagttcataatatccaaaaggaaacaggagagtgatattactccccatatcgccgggggtgtacacgggagggggagtacacccccggcgatatggtctgtaatatccagggaaggagaggagggtgatattactcaccatatcgcaggtggtctacatttacctgtgaaacagtttgtaatatccagggggggaaatgagaatgattttttttttttgagtctcactgtgtcacccaggttggagtgcagtggcacgatcttggctcactgcaacccccgcctcctggactcaagcaattctcctctcccagcctcctgaatagctgggactacaggcgcaccccacaacgtctggctaatttttgtatttttattagagacggggtttcaccatattggccaggctgatctcgaactcctgaccctgtgatccatccgcctcggcctccaaaagtgctgagattacagatgtgagccaccacgcatggcccaaggagaacgatattactccccatatcccagggggtgtatatccccctgtgatatggttcagaatatccggaaggaaagacagggatattacttcccatatcgcaaggggtgtgacatggttcgtaatatcccatgggggagagggtaatattactcttcgtattgtgaagggcatacactcccctgtgatacagttcataatattccggggagtagaggaagatattatgctccatatcgcgggtggcataagccccctgtggtttggttcataatatccagggaggagagggtaatattactccccatattgtggggacgtacaccctcctgtgatatggtttgtaatatcccagaggggagagagtgatattactccccatattgcagggacatacacccccctgtgatatggttcaaaatgtcttttttttttgaaggactggttctttatttcaaaaagacacttgtcaatattcattatcaaaacagttgcactattgatttctctttctcccaatcggccccaagtagaccacatcaaaggagagtacatattaagccaataagctgtaggatgtacacctaacagacctcctagaaaccttaccagaaaatggggacagggtagggaaagaaactttaaaagatcaacaaactgccagcccacggactgcaggggctgtcacagccagatggggtggccagggtgccacaaacccaaagaagcaaagtttcaaaataatataaaatttaaaaagttttgtacataagctattcaagatttctccagcactgactgatacaaagcacaatgagatggcacttgtagagacagcagcttcaaactcagaaaagggtaatgagatgagtttcacatggctaaatcagtggcaaaaacacaatcttctttctttctttctttctttcaaggaggcaagaaaagcaattaagtgctcacctcaacataaggggaacatgatccattctgtaagcagttgggagggggtagagatggaacaaaattttggtctcagaggtcttgccatcttaatttggtcacttctaatgaaaaaaataaaaaatagaaataacattatccaaaggtatcttaaagctgaaaacttgaacagcacattttttgttgttgttgtttggctaactcctcctggaaccacctttctggcttagctagtactttgtacagagcaatgaggcttcccatagtggagtctccctgggctctgtttggctctcagcaaggcaggcctataccttttcctctcctccatggagagaggaatatgcattaaggtgaaaaatcaccttccaaaagtgagaaagggattcgatcgctgcttcagggctgtggtattatatggaatgttttacaaaaggttgctacaaaacaacaaaagaggtaattacaaaatgtgtacatcacaacatactttttaaagacattatgcattgtgctcacattcccttaaatgttgtttccaaaggtgctcagcctctagcccagctggaatctccgggaagaggcggacagtttggtgaaaaagacacagggaaggagcgggcggcggaaggagggggcggcgaaaggagaaagcagccttccagttaaagatcagccctcaattaaaggtcagcttcgggcaggctggcctcaggcggagtctggttcagagggaggagcagcagcagggtgagactgaggcgttctacatctcattcaggtcaagcagagtctggtccagcatcctttgtgtacagaggtgctcccctttggtgcatttcagtttatcttccaagtcatcaattgtcttttccagcttggctaccgatctctcagcaaactcagcatgggtctccgcctcctttattttatcagtaagaatcttgatctcttcctcatatttgtcttctttttgagagtacttttcttcagcagcactcagacacttcaggttctggtccatcagtctaatctgctcatccatctctcggcaaagggattctgccagctcagctcgttcctctgtgcgttccaagtctccttcaatgatcaccaacttacgagccacctcttcatacttcctatctgcctcttctgcaatgtgcttagcttctctgagttggatttcctggagttccatcttttcttcatcttttaaggcccggttttcaataaccttcttacctctctcactctcatcagcagctttttccgcttcttccagcttttgcagggcagtagccaggtgctcctgagcacggtccagctcctcttcaaccagctggatcccacgttcaaggaggccacctcagcctcagcctgttcccgggcccacctttctccctcaacttctcgctggaggcgctcagctcgctcctctgcatcatctgcctgctgctgcagaacctggatcttgcgcttcaccgcctcgatggtggtgatcccagccatggtgcccacccagctactgctagagctccggttcctgcctcctccgatcggcgttgcagcctcctctcacccttacttccgcctcggttcaaaatatcttaagggaaggagttgatattactccccacatcacgggaagtttacatcccctggtgatatggtttgtaatatcccagggtggatagggtgatattactctccatatcgcgaaggagtactcccccctgtgatatggttcataatatccttggggggagagtgtgatattactccccatatcgcgagggccatatactcctttgtgacatggttcgaaatatcccggtgggggagggggtagagggtaatattactccccatacagcgaagagcatacgcccttctgtggcaaggttagtaatacttcagggaaaagagtgcaatattacttttcatattgcagggaacatacactcccctgtgacatggttcgtaatatcccgggggctgagagggtgatatttctccccatatcaccgggggcctacacctgggtgtgatatggctcataatatacagggagggagagggtgatattactccacataccgagtgaggggttacacaccctcgtgacatgttcgaaataccccaaggaggagacaatgatattactttccctgtcgcgggggctacaccctcccagtgatatggttcacaatatcccggggtggagagggtgatattactccctatatcaccggggggtgtacacttccctgggaaatggtttacagtatccccggggggagagggtactattactccccatatcacgttacatatcagggtacacccccacgtgatatggtttgtaacatcccaggaggaagaaaatgatattactccccatatcgcggtggcatacacccctccccgttaaatggttcataatatcttggggtggagagggtgatattactccccatatcacgtggggcatacaccccactatgatatggttcataatatcccggaggggagagggagatattactctccatgtcgcggggggcatatacacccctgtgatatggtttgtgatatcccgggggcggagagggagatattactctccatatcgtggggtcgtacacttttctgtgatatgattcgtaatatccagacggggagagggtgatattacttcccatattgcgggggcgtacacccctctgtgatatggttcataatatcccgaagaaaagagggtgatattactcctcatatcgcggggaacacacaccaccctgtgatatggtttgtaatattcagcgggggagagagtaatattactccctgtatctcggatggcgtacactcccctgtgatatggttcataatatccagaagaaaagagggtgatattactccccatattccagggaatgtacaccaccctttgaatatggttcgtaatatccaggaggggagagggtaatattgctcccaatatcgaaggaggtgttatacggttagtaatatccagagaaggagagggtgacattactccccacatcgtggtgggtgtgcacccacctgtgatatggttcataatattcaggttaagagaggtgatattgctttccatatcgccaagggtgtacactcccgtgaaatacagttcgtaatatccaaaaggggagagggtgatattactcccatatcgtggggggtgtacacccctctgtgatatggttcataatatccagggtggaataaggtggtattactccctgtatctcggggcatgtacatcgcctgtgatatgattcataatatccagaagaagagagggtgatattaatctccatattgctgggggtgtacaaccccctgttgtatggtttgttacactgagttggggagagggttacattactctcaatatcgagtggggcatacacacttatgtgatatggttcataatatcccagggaggagagggtgatattactccccatatcgcgggaggcatacaccccaatgtgatatggtttgtaatatctacatttttttttttgagacgaagtctcgctcttgtcccccaggctggagtatgatggccggatctcggctcactgcaacctcagcctcccgggttcaagcgattctcctgccttggtcccccaagaagttgggattacaggcgcacaccaccacgcccggctactttttgtatttttagtagagaaggggtttcaccatgttggccaggctggtctagaactcctgacctcagatgatccacctgcctcggcctcccaaagtgctgggattacaggcgtgagccactgcacctggcctggtttgtaatatctatgaagggggaaggtgatattactttccatatcacgggaggcgtacaccacgatgtgatatggtttgtaatatccagggggtatactgggtgatattactccccatatcgcggggagtgtatacccttttgtgatatggttcctaatattaagctgaggagaaggtaatattactccccatatcgcaggggtttttatatggttcataatattcaggaagagagagggtgacattactctccatatcacggggtgtgtactcccccatgtgatatggtttgtaatatccagggaaggagaggttaatattactccccatatcgcagggggtgtacacctctctgtggtttgtaatatccaaagggaagaggatgatattatcttcaatatcttggggggatacagtccccagtgatattgttcataatatccagagggggaggggatgatattactcccaatattgcaggtggtgtacaaccccctgtgatattctttataatatagagggggatgatgatattactcccaatatagtaaacaacctgtgtgtacaccccctgtgatattgtttataatatccaagggtggaaaggatgatattactcctcatatcgcagggggtgtatacccctctgtgacattgttcctaatattcaggggaggagaagatgatactactcctcatatcacaggggatgtacacccccctgtgatacttttggtaatatccaggggaggagaaaattatattattccccatgtcacagagggtgtacaccccgctgtgatagtgttcataatatccaggtgaaaagaggatgatattactccgaatatctcaggaagtgtacacccttctgtgatattgttcataatatccaaaggtggagaggaggatactactccccatatcgcagtgggtgtacacccccctgtgatatggttcataatatccaatgtaggagaggatgatattactttccatatcgcggagagtgtacatccccctgttatattgtttgtaatattcagggagaaagaggatactactactccccatatcacacggggtgtatattcccctgtgatatggttcctgatatccaagagatattataatcctctcttggattatgctacctctcatatcgcatggggtgtacacacactttgtgatatcgtttgtcatatccaaggagggagaggattatattaatcccaagatcacggggggtgtacaccctcctgtgatattgtttgtaatattaaggggggagaggataatattactcccaatataattaacaccctgtgtgtactcctccttgtaatattgttcataatatccaatgggggagacgatgatattactttcaatatcgcagaggatgtacatccctttgtaacaatgtttgtaatataaaaggcaagagaggatgatactacttccaaaattgcaggacatgtacaccccccggtgatattgttcctaatatccagtggggaagaggatgatagtagtcccaatatcgcaaagggtgtacacaccccctgggatattgttcctaatataaaaggaggagaggatgctattattcccaatatcacagaaggtgtaaaatcccctgtgatattgttcgtaatattcaggaggggagaggattatattactcccaatatcacagggtgtgtacacagggaggggcaagggccagaagcgggcgggaatccccatgtttgggcggacccagtttctaatggccagcatttgccaatcaaagcttaccagagaactctaaaagccagggctttcctgctagacaagactcatttctggaactgctttaaaaagaaacaaaacttcccaaggaccccttttcctctctgtctgcctaaaataatgttttaaaaactcctaaagcagctgaattcagcccccttcctgggggaatgtatagacggaactcccacctttcccggcatcccaaggccagagtatgtgaaactcctgggtctctatgtgtgtctgagcggctgctctgccaacactccacacagccctgtgtcctggacccaaggcccttatgacctgagctcaagaggggatctcctgatccatgggttgcaaagatccatgggagaagcatggtttctggggcggggtcacacgctcagtcactgtttccctcggatgccggagatggttcctttggctctctgccaatacagggtgaatcatcatccatccctcttttctttgttctcccgggtcaagttgtttgcctagtcagtcccaatgtgagaacctgaatatttcagttgacgcgctgacttcaaaatccccgggcttcgggaggcggagcttgcagtgagccgagatcccgccactgcactccagcctgggcgacagagcgagactccgtctcaaaaaaaaaaaaaaaaaaaaaaaaaaaaaagtccccgggcttttcttttcactcagtggaaggcagctgcttctaattggccatcttggcccgcccccaccacgtgaccttctgtaaaatgcctccactctccaggaacgctctcattatataactttgcctgaaaccaacagcacgctcattgcacatatcatgggctcatttatttcacttataaagaacctggccaaggaagagatagtgcctaaagtggccagtattctgaccgatatgttagaaaaatggtgtgccgaccaattcatgacatgtgtcccaaaactagcaacggaaattgtattcgccgtgttgaggtctctaatccagatgatgctcatctatgtactggaaaaggcagagtcctttcctgacaagctgctgaaactcttcagaaacatctcatatttcctgaagaagatgatgtctggacaagcagcacaggtcgttcagatttaactttctattcatatatccagcacgatattcgcacaattgtcacgaaaccttaccagttgatgagtcctgcacatttcctttaatttcaggaggaagagggtaatccggatgagttttctgacctactctgctgctgtgattaaacaaccaccaggaaattttgacgacactgttctcctgagctcctccctttcctccgggaacaaaacaattgaatttacaaaaataaagtgttatttgactggagtgaggtctcatgtctgcttatgcggtggctcgctgctcagaacagggtgagtctctgggttgtgtgctgaggaggggaggctctcaatctggagaaaacccactgcaggggacacctccatggggtctgagggactgaggatgaggagccggactgggtctagggaaggaggaggtttcagagggtgaaattctggcactaaagcctgggggtgtttgggaacttcctccttccgaagaagtttcagggagggataaagacaaaccctgggctccttgaggggcccttactaatttgagaggactctatcgggaaggagagtgacaatggcctccttgaggactgaggcccctgaataaatgaggcccagatacagtccatgggggatgagaccttcaagggtcacattttggttgggacagaggaaaagtgcagctctgcagccgcagaggaaaacccggcagtgtgaaagcgaccttggaggggccctgtgcgctctgaatgcgtctgagcccccatcccctgtccccgcctctctttctggattcttccagctcggctgtctccgccatcttctgagcgctccaccctgacttattcaagtttcccttctgccttccaagtactccaaaatctttcagatctgtgtccctacccctgtttttagcatgtgttggggctccaggtccctgaaggtttctggcctgaaatccacctccccagcggagtggactgcgttctagagactccacactccgcgaggttcccaggcccctgagggacaaccgagtggcctgcgcacttcagggctccacactcggcaaggtctttcaagcccttggggtccccttcttagttttttccacctttctgggctgcagtcactccataaatgctgggatctgatccccacccccactctcgtttcctcaattctgcgggctacacgctctggcaaggtcctccgggccctggatcccctccctctccctatgcccacgctcctagtcagcccttctggggtccactattttcaggaactaaccgttctcatggagccttgctaaccggaaagctgtgtggaagaaaggctttgaggatagaggtggagatttggctcttccatagtgccactcacccaccccaccatgctgccactgccagacccggacccctgtttcagaacaagtgaccagattcgctcctggacagccctggacactggccttttctctgaaaactactcaccctttctctagtccccacttcatgccagcctcataccctcttccttcccccacgctggcttccgggatcctcctctgctcagacaacctcttctgtgtcccacccccgtttttagaatgctttggggcaccaggttgggggaaggtttctggcctgatatccatctctttccaaactcccttcttcccttgaaaggcttcttgccttcagccccacttctggctccgaggtttcaggacaccctcctcttcatcctcattcttttgaccaccagctttttaggaattcgaacgtccctctcatcttcgtgaatcctgtccaggcatttgttgaccccttcatctgatacccctgacctcacattgccaaaagtctacccctacccagtacactggaattagacaaaatcccaggagttttacctcaactctgagtgtgcccacaggagctctccctgaagccacgtccttttaagcagggtctagggttcctcccttgtcttaatgaactctttgtcacacggaggacgttatggagcccttatgatctttcactgcctttctgcccagcgttttgtctttccatggacatttataatattttccatggacattttgttctctcaatgtccacccctaatttccaacatcccaaagattctcatgtgtttcctgaaagccatttacaggaatggctgtgcccagacccccttccccaggatcctccttcacacctggtaggtgcctctcctagagagatttgcactcagttgtcgtgcagtcacatggcccagatggttgttaatcacccccttcctggcaacagctagcagccagggaatcactggcacagaaacctcagggtgaccaagatgaggccacctctgtgctgaaggctgtgctccagagcctgcttgggatcaggcttaagcaggtcttcagccagacctgatgttacctggtttccttgagctgccctgcctgagctatcgggagcactccctcaatgcacatcttgattccctatctcatgctctgcttctagaaaccatgagctatcaattgctactggcaatggtcctgggaagtcaaccctaagtatggattctggggttggatgactccccacaggacttcagtgagcaacaatcactgctggcagttggaggacagagtcgctagggcatgtgaccactgtgaaaccaccgatgtttcacctggggtaattttggatgaactacggtagaagcactgaaggtacattgcttttggtttggaagattgtaggtaaataatagcgatatgaatgtggaattggatggctgcaaacgagtgccattgatgcattgaaagaggaaaagtcaggctgtcacctgtcactcagcaatttaaagtgtgagagttgggactagatgtggtggctcacatctataatccagagattcgggggaagcttgaagaggtaggatcttttgagtccaggagttccagaccagcctggacaccagagcaagacctcatctctacaacaaaattttcttaaaaattagatgggcttggtggcacgcacctgtacttgtagatctagctaatggggagcatgagataaaaaaatcacctgagtcagggacttaggggttacaatgaggtatgattgtgccagtgcacacactcccacctggccaacagagtgagattctgcttccaaaaaaataagaaataaatcaggtttgagagttggaaagcatcatcttctcctagagccaaaggacatgtacaactgagacccaggaacaaagcttcatcacaaagagaccatcatcagtggagccgggagatgcattccccctcaccctgccttgaggaggcagtggagtcatctgtctgggatcctttctgacccagccctatttgtttgtctctttggcttctttggatttgtatattttagctgttataacactgtaaaacaaacagagtgatttttttgagttgtgtgaatgatgctagctccatagtcaccctgagagtgatgggaacttttgaatttgtggcaagttggagggtagtgtaagtgacctgagattgccaaattggggctagcactggatgtgaggttaggctagtggaaaaatatgcccagaaccagaggagtgtgggctcactgcaggtggttaggctcagatccaaattgtacagatggatagctttggggtaaagaataacatagttgagaagtgcatgtgttagtctgttcatgcactgctataaagaattacctgagactgggtaattatttataaaactcaggtttaattgggtcatggttccacaggctgtacaaaaagtatgatgctggccatcagctcaacttctggggaggccccagaatagttagagtcatggcaaaaagtacaagggaagcaggctcatcttccacggccagagctggagcaagtggtaggagaggtgatacacactttcaaacaagtaggtcttttgagaactccatcaccggacagcacctatgggatggtgctaaattattcatgaaatatccgcctccataatccactcaactgtcaccagcgcagccagccccacctccaacagtggggattacaattccatatgaggtgtgggtggggacacagctccaacctcaatcagtgggcatcctggattgggtctactatagaaggagaaccaggagctgactatgatcttgaaccctacccatgatggccgggcggggtgactcatgcctgtaaccccagcactttgggaggctgaggtgggtggatcgcctgaagtcaggagttagagaccagcctggccaacatggtgaaaacctgtctctactaaaaatacaaaaaattagaccggcgttgtgctggatgcctgtaatcacaccactacgctccagcatgggaaaaaataccaaaacttcgtctcaaaaaaaaaaaaaaaaaaaaaaaaaaaaagactgcccatgaccactgcaccagtgagagggacaccagcatcactgagatgcaagggctggacattcttcataggtcagagctcaaagcaggggacactgatacagagatgggctccatccatagcaccaaagtggtgagaggatgtgggaatggcagaggccagcactttgccatcaatgcaagggggtataaggaggtgacaccagtgccagagtacatcacggggggactgccctacaatatctaggacttacctcttagagcgtgtttcattagcgacaacagatataaatggcagacaggtgtgtccctgcattaacaggaaatagaaatcatcaagaggaacagaaggcagatgtcagcagccccttagaaagtcatcatccttcatacagttaaaatctgagacagttctcacacgagaaggcctaactcaaaaagaggctgggttctcatgaggcaggtttatgcaaaaccaaggaaggtgtacaagtttggaattctccagtttcccttggaaaagacctacagtcatttgcttaggtaactgagcactgaacaaaggtgagtattgttgtcttttagaagctcttggccaagaaggccttgttggcataaaacccatggtttggaaacatcaccatgacccctgttagagtaatggcctaagggtgggggtcaggaaattgatgtattccttgccaacttctgcctctaagtgagtgaactctgtttgtgaacctctctcctctgtggttatgttcctaggctctcatgtataatcaggagtcatagacttagaaacaggaaaaatacttacagtgtttttgtggcctgtgagctatgacttataattttaggaaaaaaacaattgcaaatggaaagcctaagtctatcaatgctcatccaagacaacataatcaataaaaaccaatatcaaatctcaaggcaaattatttcctgtatatagatggcagagatgagcaccaccatcaaaaactcaaggaccagtgctgtgggtccagtcatctgtttcatggaattcaccagtctggtatcttcaaaatccagaaggatgatggcagatggcaggaaagtaatgcaaacgtcatcaggtgtgaccccactgtagcagctgtgatggatgttttctctcaccatagcaataaataacacaacctcggtcacactgtatgcattgttggtctgcaaaatccatgttttgcaaaactcttcaggaaggtggatctgtaatattggcattgacatgagaacaacagcagtatttattcacaatctcaagctctctgtcttcccgtctctctcattagccatccaagtagtcctgaggaaccaagcccatcagaacattctgcaacataatacacagctccattctccattcaaattttgttgttgttgttgttgttgatgagacaacatcttactccatcagccaggctgacgtacagtggggctatctgggctgactgtagtcttgagcttccaggctcaaggcatcctctcacctcagcctcctaagtggcttgaactacagacacacagcgacatgctgggctagtttttgtatattttgtagagacgtgctctcaccatgttattcaggctggactcaaactcctgagcgtaagtgatccaagcaccttggcctcaaagtgctgagattacaagcctgagccactgcacccagcccaatctccattctactgataacaatgtcattaccaggtctgatggacaggaaatggtaaggtttctgaaaacctaaggatcacacagcgagttccaaaggctgaaagtgcatacctgtcgacactgataccaatgacatccaatggtgagaatgacattccttgtagtcctagctctgctcataacaaatctatactgaagtgtaagagtttgatggtcatggggattttccatgtctctgcctttcagcgatgtgccatatctgtgaagtgttcagaaatgcaacagcctgaggcatgctgggcatatcctctaataaaaaggaaaatgccattttatggtcctgtatttctacaagttggaacacatgggcctgtgatccagatgggggaaatgggaatattcccactcattcaccttcatccacgaagcccatttgaaagctttgggcttcccatccttgtagattttagtgttgtgggctgggtgcagtggctttcacctgtactgccaacactttgggaggcctagacaggtgaatccactgaggccaaaagttcgagaccagcctggccaagatggtgaaaccccgtccctactaaaaatacaaaaattagcaaggtattggggccagcacctgtaatcccagctgctcgggaggctgaggctggagaatcgcttgaacccaaaaggcagagactgcagtgacccgatcctgcctttgcactccacctgggcaagcagaacaaaacttctgtcttgaaaaaaaaaacaaaaaacgaacaaaaaagatgttagagttctgggtttagaggtctataccccagaaagagaatggtttcaacaagggacaaagaagttgctttaaacgttgacttgccatttcttttcagtgtgtttgttctcttgcgtcaagagaccaccagaaaagtggtgcaattactctcctgtcaagaatcattgactatcatctgcaagagggtcagatcctggtatataattagggcagaaatacttagtctgagaagggtatgacatccagaggccctattaatgatgtccttttctccatgcctgactctgaccccatgtgctggactgcccctgtgtggatggcctcatggcctgctcggactctgaggtcccaccccaagtggcacctccatggagggctctactcttgtatgggctctgacactcacactgagacactctcccatggacacctcttcacccacttggggtctgaaactgggctactccatccctccctaacctggaacagagagctttcactgctattacacaagtcatagaggctaactcctcatttttccaagctaattattgaaacattagtcctgggttgataagacaagataagttaacttttcataaatttgcttatcaagttttgaataaattcaaataaattcaccttccccacacaccttagttgtcgacatcacacgcgcacccatactcacagggtgagcacgaaggcttcactgtcagtggagaaagtggcaaaacccttctgtgcctcatcctggtctagacctggccctcatcctttcccactcttcccctcactcccttggattcatccacactggcctcctgcctgctgctccacctccctgcgaagctcacccctgcctcagggcctttgcacgtgcagtggcttcaagccatatcctcttcacccagatctcccagatctcctgaatgatcttcttttatcattcaggtctcagcttgcatgtaatcttctcagtgaggattacccaaaccacatagttcattcattcattcaaatattcattcaatggcatattgacaaagcagctacttcatgccaggccttgggccaggtgttatggatatggcaacaaacaaaacaagagttttctgctctcaaatttttacccacttaaaggagatatcatacatcatctgtaaataaatacatcatctgtaaataatgatgtaaataaatacatcatctgtaaatctgtaaataatgatgtaaataaatacatcatctgtaaataaataaagtataataaaagaaaatagtaggtttttttggttggaggtgaccgtgaagtttgcaaataccatcttacaacacattattttattttatttcatttcatttttaattttattattattatactttaagttttagggtacatgtgcacaacgtgcagatttgttacatatgtatacatgtgtgaagttggtgtgctgcacccattaactcgtcatttagcattaggtatatctcctaatgctatccttcccccctcccccaccccacaacagtccccggtgtgtgatgttccccttcctgtgtccatgtgttctcattgttcagttcccccctatgagtgagaacatgcggtatttggttttttgtccttgtgatagtttgctgagaatgatggtttccagcttcatccatgtccctacaaaggacacgaactcatcattttttatggctgcatagtattccatggtgtatatgtgccacattttcttcatccagtctatcattgttggatatttgggttggttccaagtctttgctattgtgaagagtgccgcaataaacatacgtgtgcgtgtgtctttatagcagcatgatttataatcctttgggtatatacccagtaatgggatggctgggtcaaatggtatttctagctctagatcactgaggaatcgccacactgacttccacagtggttgaactagtttacagtcccaccaacagtgtaaaagtgttcctatttctccacatcctctccagcacctgttgtttcctgactttttaatgatcgccattctaactggtgtgagatggtatctcactgtggctttgatttgcatttctctgatggccagtgatgatgagcatttcttcatgtgttttttggctgcataaatgtcttcttttgagaaatgtctgttcatatccttcacccactttttgatggggttgtttgtttttttcttgtaaatttgtttgagttcattgtagattctggatattagccctttgtcagatgagtaggttgtgaaaattttctcccattctgcaggttacctgttcactctgatggtagtttcttttgctgtgcagaagctctttagtttaattagatcccatttgtcaattttggcttttgttgccattgcttttggtgttttagacatgaagtccttgcccgtgcctatgacctgaatggaaatgcctgggttttcttctagggtttttatggtttgaggtctaacatgtaagtctttaatccatcttgaattaatttttgtataaggtgtaaggaagggatccagtttcacctttctacatatggctagcctgttttcccagaaccatttattaaatagggaatcctttccccacttcttgtttttgtcaggtgtgtcaaagatcagatagttgtagatatgtgacattatttctgaggactctgttctgttgcattggtctatatctctgttttggtaccagtaccatgctgttttggttactgtagccttgtagtatagtttgaagtcaggtagcatgatgcctccagctttgctcttttggcttaggattgactttgcaatgcggggtcttttttggttccatgtgaactttaaagtagttttttccaattctgtgaagaaagtcattggtagcttgatggggatggcattgaatctataaattaccttgggcagtatggccattttcacgatattgattcttcctacccatgagcatggaatgttcttccatttgtttgtatcctcttttatttcattgagcagtggttttagttctccttgaagaggtccttcacatcccttgtaagttgggttcctaggtattttattccctttgaagcaattgtgaatgggagttcactcatgatttggctctctgtttgtctgttattggtgtataagaatgcttgtgatttttgtacattgattttgtatcctgagactttgctgaagttgcttatcagcttaaggagattttgggctgagacaatgggttttctagatatacaatcatgtcgtctgcaaacagggacaatttgacttcctcttttcctaattgaataccctttatttccttctcctgcctaattgccctggccagaacttccaacactatgttgaataggagtggtgagagagggcatccctgtcttgtgccagttttcaaagggaatgcttccagtttttgcccattcagtatgatattggctgtgggtttgtcatagatagctcttattattttgagatatgtcccatcaatacctaattattgagagttttcagcatgaagggttgttgaattttgtcaaaggccttttctgcatctattgagataatcatgtggtttttgtctttgggtctgtttatatgctggattacatttattgatttgcatatattgaaccagccttgcatcccagggatgaagcccacttgatcatggtggataagctttttgatgtgctgctggattcggtttgccagtattttactgaggacttttgcatcaatgttcatcaaggatattggtctaaaattctcttttttggttgtgtctctgcctggctttggtatcaggatgatgctggcctcataaaatgagttagggaggattccctctttttctattgattggaatagtttcaggaggaatggtaccagttcctccttgtacctctggtagaattgggctgtgaatccatctggtcctggactgtttttggttggtaagctattgattattgccacaatttcagatcctgttattgctctattcagagattcaacttcttcctggtttagtcttgggaaggtgtatgtgtccaggaatttatccatttcttctagattttctagtttatttgcgtagaggtgtttgtagtattctctgatggtagtttgtatttctgtgggatcagtggtgatatcacctttatcattttttattgcatctatttgattcttctctctttttttctttattagtcttgctaccggtctatcaattttgttgatccttttaaaaaaccagctcctggattcattaattttttgaagggttttttgtgtctctatttccttcagttctgctctgattttagttatttcttgccttctgctagcttttgaatgtgtttgctcttgcttttctagttcttttaattgtgatgttagggtgtcaattttggatctttcctgctttctcttgtgggcatttagtgttataaatttccctctacacactgctttgaatgtgtcccagagattgtggtatgttgtgtcttttttctcgttggtttcaaagaacatctttatttctgccttcattttgttatgtacccagtagtcattcaggagcaggttgttcagtttccatgtagttgagcggttttgagtgagtttcttaatcctgagttctagtttgattgcactgtggtctgagagacagtttgttataatttctgttcttttacatttgctgaggagagctttacttccaagtatgtggtcaattttggaataggtgtggtgtgatgctgaaaaaaatgtatattctgttgatttggggtggagagttctgtagatgtctattaggtccgcttggtgcagagctgagttcaaatcctgggtatccttgttaactttctgtctcattgatctgtctaatgttgacagtggggtgttaaagtctcccattattattgtgtgggagtctaagtctctttgtaggtcactcaggacttgctttatgaatctgggtgctcctgtattgggtgcatatatatttaggatagttagctcttcttgttgaattgatccctttaccattatgtaatggccttttttgtctcttacgatatttgttggtttaaagcctgttttatcagagactaggattgcaacacctgcctttttttgttttccattttcttggtagatcttcctccatccctttattttgagcttatgtgtgtctctgcacgtgagatgggtttcctgaatacagcacactgatgggtcttgactctttatccaatttgccagtctgtgtcttttaattggagcatttagcccatttacatttaaggttaatattgttatgtgtgaatttgatcctgtcgttatgatgttagctggttattttgctcattggttgatgcggtttcttcctagccttgatggtctttacaatttggcatgtttttgcagtggctggtactgactgttcctttccatgtttagcgcttccttcaggagctcttttagggcaggtctggtggtgacaaaatccctcagcatttgcttgtctgtaaaggattttatttctccttcacttatgaagcttagtttggctggatatgaaattctgggttgaaaattcttttctttaagaatgttgaatattggcccccactgtcttctggcttctagagtttctgccaagagatcagccgttagtctgatgggcttccctttgtgggtaacccgacctttctctctggctgcccttaacattttttccttcatttcaactttggtgaatctgacaattatgtgtcttggagttgctcttcttgaggagtatctttgtggcattctctgtatttcctgaatttgaatgttggcctgccttgctaggttgcagaagttctcctgggtaatatcctgaagagtgttttccagcttggttccattctccccatcactttcaggtacactaatcaaacgtagatttaatcttttcacatagttccatatttcttggaggctttgtttgtttctttttactctctttcctctaaacttctcttctcacttcatttcattaatttgatcttcattcacttatatactttcttccacttcatcaaatcggctactgaaggtattgcatgcatcatgtagttctcatgccatggttttcagctctatcaggtcatttaaggtcttctgtacattgttttctctacttagccattcgtctaatcttttttcaaggtttttagcttccttgtgatgggtttgaacatcccctttagctcagagatgtttgttattactgaccttctgaagcctgcttctgtcaacttgtcaaagtcattctccatccagctttgttccattgctggtgaggagctgcgatcctttggaggagaagaggtgctctggtttatagaattttcagcttttctgctctggtttctccccatctttgtggttttatctacctttggtctttgataatggtgacctagagatggggttttggtgtggatgtcctttttgttgatgttgatgctgttcctttctgtttgttagttttccttcgaacagtcaggttcctcagctgcaggtctgttggagtttgccggaggtccactccagaccctgtttgcctgggtatcaccagcggaggctgcagaatagcaaatattgcacaacagcaaatattgctgcctgatccttcctctggaagcttcgtctcaaaggggtgcctggctgtatgaggtgtcagttggcccctactgggaggtgtctcccagttaggctagatgggggttagggacccacttgagaaggcagcctgtccattcacagagctcaaacactatgctaggagagccactgctctcttcagtgctgtcagatggggatgtttaagtctgcagaaatttctgctgccttttattcagctatgccctgcccctacagatggagtctacagaggcaggcaggcctcattgagctgcggtgggctcctcccagttcgagcttccagaccactttgtttacctactgaagcctcagaaatggtgaacacccctcccccacccagtctgccgccttgcagttccatctcagactgctgtgctagcagtgagcgaggctccatgggcgtgggacccactgagccaggcacaggatataatctcctggtgtgccatttgctaagaccattggaaaagcacagtattaaggtgggagtgtcccaattttcccagtacagtctgtcacgggttccctcatctaggaaaggtaaatcccctaaccccttgtgcttcccggtgacgcaatgccccaccctgcttcagctagccctccatgggctgcatccactgtccaaccagcccaatgagatgaacaaggtacctcagttggaaatgcagaaatcacccatcttctgtgtggatcaggctgggagctgcagaccggagttgctcctattcggccatcttggaatggcaatctatgtttgctttttacatttgaaaaaactggtgtcacgtacctaggtattaatcattgtggtatcctcttgccgatttacctctttatcattaactagtgaccctccttgtcttttgttgttacagtctgtgattttagtctattttatctaatatgagaatagctactctggcacttttttggtttccagcttcatgaaatatccttttccatttccctgttttcatttccctttcggtgtctctatagatgaagttgatttctttaaggcaccataagttgggtcttatttctttatccatttgaccatttagagaatttagaacactgtcagtgttattattcataagtaaaaacttaagagtgggtgtagtggtgtacatctgtatttcctgcactttgagagactgaggcgagctgatctcctggggtcaggagtttgagaccggcctggtcaacatgatgaaaccctgtctctactaaaaatacaaaaattagccaagcatgctggcatgtgcctgtaatccaatttacttgggaggctgaggcaggagaagcttgaacctgggagacaaatgttgcagtgagctgagatcacacagagaagtcatctccactctcctcatcagaacctcttgttcacagcatttgtgagcacaaatcaatgatggttattctttcctactaattagggatattttattacacagcaatagcctccagcaaagggaaccatcatacatgattcctacaagttgacagggctggaattatcactgaaaaactaaggtggctatacttgattcccaatgtccaatttttcatgaatagagaaatttatcctttttccccccagccagaaaccaagttttgctcttacgcccaggctggaatcaagtggcacaatctcagctcactgcaacctctgccccccagcttcaagaaattcaccttttgaacaaggagatattaaggatacactatgtgtatgctaccggtggttgcaggagactcagaaaagagagaaacagtcactggcctcgtgcaactgatattctcgggaggagagaaaggcaatcaagaaagaaacatgctgtatttcagacagctgtaagtcctccacaagaaaagaaagcaggtgaggaacataggaaatgtgtcaaccataaggttcccgctaattctataagttggtcagggatatcctccaagaataagcagcatctgagcaatcacctgaagggaggaaggaaggaagactgtgagtggtggcttacacctgtaatcccagcactttgggaggccaaggagggcagattgcctgagctcaggagttcacgaccactcagagcaacctgttgatacccaatctctactaaaaacacacaaaaaaattacccgggtgtggtggcacgcacctgtagtcccagcttccatgcccagctgatttctctctctccatatatatatatatatacacatatattgtttttgcagagatagggtctcactgtgtcacccagtcatcaagcaattctcttatactgttttggaaaagcatgggaattacaggtgtgaaataccctgctggtcctgaaaaatgtgatatttgggattctctgcctggcttgttttacccaaaataatgacctccagttccttccaggttgctgcaaaagacatgattttcactgttttataactgaatagtattcctgtatgtatacataccacattttctttatttattcttctgttgattgacatgtagggtgattccatgtctttgctactgtaaataatgctgcagcaaatatttgtgtgcattttgatctattcctttgagtaggtacccagtactgcaactgcaggactgagtagttgttatattttttgttctttcagaaatctccatagtgtttgccataaaatctgcactaatttacattcccaacaacaatgcataagatttccccttttctccacattctcactaacatttgttatgtttttgtctttttcataatacccattctgactggagtaagatatctcattgtggtggttgttgatatttttgagacggggtctcactctgttgccagactggagtgcagtggtgtgatcgtggcttgctgcaacctccacctcccgggttcaagcaattctcctgcctcagcctcccgagtagctgggactacaggcgcgtgccaacaggcctggctcattttttgtatttttagtaaagacagggtttcaccatgttggccaggatgatcacagtctcttgagctcatcatacacctgcctcagcctcccaaagtgttggaattacagtcatgaggcagcgcacccaacctcaatgtggttttaatgaccatttctctgacgattcatggtgtggagaatttctttgaaataccttttggccatttatatgtgctcttttaaaaactgactcctgtccaggtgcggttgagcatgcctgtaaccccagaacttcgggaggctgaggccaatggatcacttgaggcaaagaggcagaaatcagcctggccaacaaggcaaaaccccatctttactaaaaatacaaaaaatcagccacgggctgtgactcgtgcctgtggtgcaagttactcaggaggttaaggcacaggaattgcttgaacccggtaggcacaggtcacagtgagccaagatcatggcactgcactacagcatgggtaatagagaaagacctgtctcataaaaacaaatgaataaataaataagataaaaaataaaaaagtctctttatgtcctttgccgactttttaatgggattctttggagttttctgttgtagttgagatctttgtttactctcggtattagtcttttgtcaaaggaaaagtttacaaataatttcttccgttctgcagtttgtctgctcactctgttgagaggattatttctttggctgtgcagcagctttttgtttcagtaaagcttttgaatttatataattaaaattttcagtttggtttaaatttgcactggtcgatttttggttttgttgcctgtacttttgaagtcatactcttgaactctttactagacaataaccagaagagttttctctagttttcttctcacatttttattatttcagtacatatatttaagtctataattcatcttcaattgatttttgtagaaatagtgagaaataggagtccaggtttattcttctgcaaatgacaattcaattgttccagcaccaattattgaaaagggtgtgctttcctcaacgtatattcttatcagctttgtcaaagatcagttggctataaatgtgtggctttctttctgggctctctagtctgttacatcaatctgtgtgtctatctgtatactactaccatgctgtattggtgatgatggctttgtaatataatttgaagtcaagaaatgtgatgctcccagctttgtttatttgcttcagaaaggctgagtcaacagctgcagagatgaagctgcccctcctcgcagggctccttcccggaaaaagatcatggctcccactgaccatataaccatggctggaactcctgaaattcccaaagggaggccctacccagtgaggggggatgaatgaaggtcctacttaaggaatctgtctggccacaatcaggcacagcagctgtgctgccttgtgggggaccagaccacctggattccctggagcctgcaggctagaatgtctgagtccatggaaacacagaaatggaggccgccctcacctccccagaaaactgtagtctcaggcagtctccagccgattgccactggttggctgctattccaagccagtgggtcttaacttgagaggtgctgtggaagtggggcccacggaatgaggctgcttggctccctggattcagccccttttctaagggaatgtacagatggaactcccgccttgcccagctttccaagtatataaaactcctgagtctctgtgagtgtctgagcgagtgctctggcaacattcgacacggctctgtgtatctgacccaagacccttatggcatgagctaatgggaggatcttctgatccatgcgtggcaaagatgcatgggagaaacatggtttgtgggtaggggttgtgcattcactactgcttctcttggctgtaggtgaaggtttctttggctctgtgctgatactgggtgcaccatcacccaccccctttgtttcttctcctgggtcaagtcatttgcctaatcagtcccaatgtaggaacctggatacttcagttcaaggtgctgaattcaccgtgcttttcattcaggggaagacagctgcttctcattgggcatcttggcctgcccacttcacgtcactttttgtaaaatccacaccactccaggaatatccattacttaacttcgcctgaaataaacagaaggctcattacacttatcatgggctcacttacttcgcctataatgaaggtgccatggaaatgctagtggatgacgtggtccattttcttagggatgagatagaaaaatggtgtatggctttttaatttaattaaaatttttagtttggtttaaatttacattggtctctttttggttttgttgcctgtacttttgaagtcttactcgtgaactctttactggacaatgaccagaagagttttccctaagtttcttctgatattttgaccatttcagtacatacatttcagtctataattcactttaaattgatttttgtaaacatggtaagaaataggagttcagatttattcttccgcatatgataatgcaactgtcccagtaccaattattgaaaagggtgtgctttccctagtgtatattcttgtcagctttgtcaaagatcagttgcctatgaatgtgtggctttcattttggattctctcgtctgttacatcaatctgtgtgtccacatttatacctgtaccatgctgtattggtgactatggctgtgtaatatattttagagttaggaaatgtgatgctcccagctttgttcatttgcttcagctgaaaaggttgagtccacaattacaaagatggcagccgcccatccccggaggacctccaacccagaaagagatcaggcttcccaccaaccctataaccctggctggagttcctgaaattccaacagggaggaccttcccagtgaggagggatgaatcaaggtcaaatttaaagaaacagtctggccactatcaggcacagcagcagtgctgccttgtgggggacccctcctgctccagaccagctgccctccctggagcccgaaggctagattgtctgagtctacggaaacagagacggtggccgccccaaccacccagaactcggtagtctcaggcacttggcttgctatcttgccactgcttggctggtattccaagcccgtgggacttgagaagtgctgtgatgatggggaccacaggatgaggctgtctggctccctgtgatatggctgtgatgagtggaggaacaccagggctcatgtctcacacagaattggagaaaatgacacaaacacatgtacagtggttttatggcgtgcagtttaataggcaagaacgaaggaagagctccccatactgagacagagggaggggggctccaaagccaaaagaggaaacccggagtgctgtggataccaatgagttatatgaagaaactggagggggcggtgtctgatttgcatagggttcaggcgattggttcgaccaggcatgtcatttatgtggcccacggaaaaactggccctcccacctagcctttgaatatgcacgtgccggacaccctgatttcctacactcatggggatatatgggggtggccatatcgccaggcacaggtggggacaagggccagaagagggcgggaatcgctatgtttgggtggacccagtttctaatggccggcatctgcagatcaaggttaccggagaactctaaaagccggggctttcctgctagacaagactcatttctggagctgctttaaaaagaaacaaaacttcccaaggaccccttttcctccctgtctgcccaaaataatttcttaacaactcgtataacacctgaattcagcccccttactgggggaatgtaccaacggaactcccacctttcctggtttctcaaggctagattgtgtaaacctcctgggtctcggtctgtgtctgagcagctgctctgccaacactccacacagccctgtgtactaggcccaaggccgccgtgactcagcccatgggaggatctcctgatttcttggttgcaaagatccatgggagaaaaatggtttctggggcggggtcacacactcatggcttctcttggctgtgcaagaaggttcctttggctctgttccaatatagcgtggttcatcacccacccctgttttctttgttctcctgagtcaagttgtttgcctagtcagtcccaatgtgagaacctgaatatttcagttcacgtgcttatcgtgaaattcactgagactttaattcagtggaaggcagcctcttctaattggccatcttggcccgccccctccacgtcacctcccataaaatggccacgctctccagggacgatgccattatatatctttacgtgaaaccgacagaacacttattacactttttgtgagctcatttacttcacttataatgaacatggccatggaaatgctagtggagaaagtggtcgattttctgatggatgtgataaaaaaatggtttgccgaccaattaatgacatatgtctcaaaactagtaacgagacccttaatcgctgggttgaagtttctaatcaagaagatgctcatctatgtattcaacaaagcagcttcccttgcttctgaaatgcttccaaacaacatctcatatttcctgaagaagataatgcctggacaagcagcacaagtcattcaggtttactttcagctcataaatccagcaggatattcgcacaattgttgggaaaccttatcagttcatgagtcgtgcatgtttcctttaatttcaggaggaagagggtaatctggaagagtttcctgacctactctgctgctgtgattaaacaaccaccaggaaattttgatgacactgttctcctgagctcctccctttcctcggggaagaaaagcattgaaactacaaaaataaagtgttatttggctggagtgaggtctcatgtctgcttatgcggtggctcgctgctcagaacagggtgagtctctgagttgtacgctgaggaggggaggctgtcaatctagaaaaaacccattgcatgggacacctccatggggtctggggggctgaggatgaggagctggactggatctagggaaggaggaggtttcagagggtgaaattctggcagtaaatcctgggggtgtttgaaaacttcctccctcagaaggagaagactcagggaggaataaggacaaaccatgggtcccttgaggggcatttactaacttaagaggactttatcgggaagcagagtgacaatggcctccttgaggactgaggcccctggataaatgaggcccagatccagatccagtccatgggagatgagaccttcaagggacatatttttgttgggacagaggaaaagtgcagctctgcagctgcagaggaagccttggcagtgtgaaagcgaccttggagggggccctgtgcgttctgaatgcttctgaggtccatcccctgtccccgcctctttttctggattttttgggctccatggtctccgccatcttctgagcgctccacgctgccaccttcagttttctcttctgggctccaaatactccaaaatctttcatatctgtgcccctacccctgtttttagcatgtgttgggactccaggtccctgaaggtttctggcctgaaatccacctccccagcggtgtggattctgctctagagaccccgcacttggcaaggttcccaggcccctgggggacaaccgagtggtatgtgcacttcagggctccacactcggcaaggtctttcaagcccttggggttccctcctcagttttcttcacatgtctgggatgtagtcactctataaatgccgggatgtgatccccaccccagtgattttttttagttccatgagtgttgctatctgaatagtcatcctgagagtgatgggaccttttgaatttgcagcaagttttagattagtgtgagtggcctgagatcgcaaaactggggctagcattggatgtgaggttaggctggtggaaaaatttgcccagaacctgaggagtgtgggctcactgcaggtggttaggatcagcacagaattgcaaggatgtatagctttggggtaaagaataacatggttcagaagtacatgtattagtcttttcatgcattgctataaagaattacctgagactgggtaattaattataaaaactcaggtttaattggctcatggttccacaggctgtacaaaaaggatgatgctggccatcagctcaacttctggggaggcgtcagaaaacttagagtcatggcaaaaagcacaagggaatcaggctcatcctccatggccagagctggagctagtggtaggagaggtgctgcacacttttgaacaatcagatctttttagaactctatcaccagacagcacctagaggatggtgctaaattattcatgaaatatccacccatatgatccactcaattctcaccggcccaaccaggaccacctccaccattggggattacaattacacatgagatgtgggtggggacacagatccaaactcgatcagtgggcatcttggactgggtctactatagaagaagaaccaggagctgactatcatccttaagactgcccatgatggccaggcagggtggctcatgcctgtaatcccagcactttgggaagccaaggtgggtgaatcccctgaggtcaggagtttgagaccagcctcgccaacatggtgaaaccctgcctctactaaaaacacaaaaaattagatgggtgttgtgccagacgcctgtaatcacagctactccagaggctgaggcatgagaattgcttgaacctgggaggcggaggtggcggtgagccccaatcgcactgctacactccagcatgggcaacaataccaaaacatcgtctcaaaaaaaaaaaaaaaaaaaaaaaaggctgcccatgaccactgccccagtgagagggacaccagcatggctaagatcaagtgctggacattcttcatgggtcagacattaaagcaggccacactgttacagagatgggctccattcatagcaacaaagtggtgagaagatgtgggaatggcagaggccagcactttgccatcaatgcaaggtgggcataaggagctggcaccagtgccagagtgcatcaggggaggactgctttgcaatatctagcacttacctcttagagtatgtttcattagggacaacagatataaatggcagacaagtgagtcccttcagtaacaggaaatagaaatcatcaagaggaacagaaacagatgtcagcagccctcatataaagtcatcatccttcatccagttaaaacctgagacagttctcacataagaaggtctaattcaaaaagagactgggttctcatgaggcaggttcatgcaaaaccaagggaagtatacaactttgggattctccagcttcccttggaaaagacctacaatcatttgcttaggtaactgagcactgaacaaaggtgagtattgttatctttcagaagctgttggccatgaaggtcttgctggcataaaacccatggttggaaacatcaccatgacccctgttagagtaatggcctaagggcaagggtcaggaaattgatgtattccttgccaacttctgcgagacgagtgttggtccactcatctctttcacggaattcaccagtctggtatcttcaaaatccagaaggatgatggcagatggcaggaaactaatgcaaacaccatcagttgtacctccactgtagcagcagtaatggatgttatctcttcattgtaatatccagggagggagaagatgacattattctcaatattctaaacaccctgtgtgtacagcctctgtgatattttttgtaatatccgtgtgggagagaattatattactcctaatatctcaggggttgtgccccctctgtgacaatgttcctaacacccaggaggggataggatgatatcacttttagcatcacagggggtgtacaccccactgtaatattgttcataatatccgggggggagagaatgatattactcccaatatcgcaaagactgtacaccaacctgtgatattatttgtaatatccataagaggaagaataatattactcccaatgtcacaggaagtgtacacccttctgtgatattgttcaaaagatccagttagggaggggatgatattactctcaatatcttaaacaccctgtaggtaagccctctgtgatattcctcataatatccagagggagaggatgatattactcccaatattgcatgaagtctacaccccacctgtgatattgttcctaatatccaggatgggagaggatgatattactcccaatgtcgcaggggatgtacaccttccctgtaatattgttcgtaatatctagaaaaggagaggataatattactttcaacatcgcagggggtgtacaccttccttgttatattgttgctaatatccagggaaaaagaagatgacattaccaccactattgcagaaggtgtacacccccccttgatatagttcctaatatccagaaaaggagaggagatattactccaaatattgcaagaggtgtacattcccctgtaatatttttcctaacattcaggaagaaagagagtgatattgcccttaatattgaagggagtgtgccccccccgtgatattgtttctaatatccaagaaatgaaaggatgatattactcccaatatcacaggggctgtacagccccctcccatgatattgttcccaacatcggggggggggtgaaatagtattattcccagtatcacaataggtgtacacacctgtcgtgatattgttcctaatacccatgggggaaaggacgatattattcttaatatctcagagggatgtacaccctccctgtgatattgttcctaatatccggggtgggagaggatgatattacccccaaaatctcaaagggtgtacacccctcttgtgatattgttcctaatatccagggtggagaggataatattattcccaatatccaggaaaggaaacgatgatgttactgtgaatattccagggggtgtcctcccctctgtgatattgttcctaatatccaggttggggagattatgatatttctccaaatatcacaaggggtgtacaccaaccctgtgttattgttcctaatatcgatggggggagaggacgatattactcccaatatcacagggggtgtacaccacctttatgatattgttcctaatatccatgaagaaagaggatgatattactttcaatatcgcaggggatgtacactccccctgtgatattgttagtaatacctaggagaagaaagtgtgatattactcccaatatcgcaggggatgtacacgcttcctgtgatattgttcctaatatttagggggaaaggggatgatattactcccaatatcgaatggtgtgtacacccccccgtgattctttttttttttttttttttttttttgagatggagtcttgctctgccgcccagactggcgtgcaatggcgcaatctcggctcactgcaacatttgcctcccaggttcgcacgattctcctgcctcagccttcggagtagctgggattataggcagctgtcaccataccaggctaatttttgtatttttagtagagttggggtttcaccatgttggtcaggctggtcttgaattcctgacctcaaataatccacccaccttggcctcccaaagtcctgggattacaggcataactttccctgtgatattcttcctaatattcaggaagaaagaggatgatattgctcccaatatcgcagagagtgtgcactcctcctgtgatatggttcttaatattcagaggaggagaggatgatattactttctatattgcagaaggtgtacacctccctcgtgatgtctttcctaatatccagtgggggagaggttattagtctcaaaatcacagaaggtgtaaacccccatttgatattgttcctaatattcaggggtggggagagaaaggtattactcctagtatttcagggcatgaacacccccaccgtgatatcattcctaatatccagaaggggaggcaatgatatttctcctaatatcacaaagggtgtacaccccttctgtgatattgtaaatattctgtgtgtacacccccctgtgttatagtctgtaatatccgggtgggggagagggtgatatttctccccatattgtaggggatgtacacccttctgtgatatggttcgttatatccagggaagaaaaaggtaatattgctgcccatattgtggagagtgtacacccccatgtaatatggttcgtaatatccaggagtggagagggtgatactgctccttacatcgaggaaggtgtacaccttattgttatatgattcgcaatatccaggggaggagagagtgatattgctccccatgtcgcagggggtgtaaaccctccgtgatatgattggtaatatccaggaaaggaaagggtgatatttctccccatatcgcgggggacgtacatcctcctgtgatatggttcgtaatatccaggaggaaagaggaaaatattgctcttcataacccgaggggtgtacaacccctgtgatatggttcgtaatacccagaagtgtacacccctctgtgatatggtttgtaatatccagggggttagagggtgatattgctccccatatcgcagtgggggtacacccccctggattggttcataatattcatggggggagaaatttacatttatcctcatatcagggggggtgtacaccccccgtgatatggttcgtaatatccaggggaagaaagggtgatattgctccttatatcgcggaaggatcaccctcccctgtgatatggttcataatacccagacgggaagagggtgatattgttcttcataaagcgaagggtgtacagccccctgtgatatggttcataatatgcaaaaggggagagggtgatattgctccccatatcacggagggtgtactcccttctttgatatggttcgtaatatccaggggtgtagatggtgatatagctcgccctattggggagggtgttcacccctctgtgatattgttcgtaatgtccagggaaagagaggatgatattactcccaatatcgcagaaggtttacaccactctgtgatattgttcataatatccagggaaggagaagacgatattactcccaatatggcagggggtgtagaactcctgtgatattgtttgtaatatccaggcaaggagaggatattactctcaatatcgcagaaggtttacacccctatgtgatactgttcatgatatccagggaaaaagaggatattactccctatatcacaaagggtgtacacccctttgtgatattttttgtaatatccaggggagagaggataatattactctcaatatcagaaggggtgaaaaccctcctgtgtcattgttcataatatttagggaaggagagagtgatattactccaaatatcacagtgggtgtacacccccctatgatattgttcctaatttccagaaggggagatatgatattattgccaatatcgcagaaggtgtacaccttactctgacattgtttgtaatatccagatggggaaatgatgatattactcctaatatcacagggggtgtacacccccttgttttattgtttgtaatattcaggggaagagacgattatattactcccaatatcgcagggtgtgtacaacactctatgatattgttcataatatccaggggaggagaggaagtgtacacccccccgtgatattgttcgtaatatccagaggtagagaggatgatattactcccaatattgcaggtggtgtacacctttctgtgatattgtcatgatattaagaaggggagaggatgatattactaacaatatcacaaaaactgtacactccctgtgatattgttcataatatccagaagaagggaggatgatattattctgaatctcgcagaagatatacaccaccctgtgatatggttcataatatcctaggggaaagaggatgacataactgtcaatatcgcagggggtgtacaattccctgtgatattgttcacaatattcagagggaaaaaggataatattactttcaatatcgcaggcggtgtacacattactgtgttattgtttataatatccggaatgagagaaaattttctcccaatatcacaggaggtgtacactcccctgtgatattgttcgtaatatccagggaggggagaggatactattactcccaacatctcagggagtgtaggccccccctttgatattgttcctaatattcggaagtggagaagatgatattacttccaaaatcgcagggggtgtacactccctctgtaatattgtttctaatattcatgagtggaaagaaagatattactcccagtattgcaggggacatacaccacactgtgatcttgttcacaatattcgggggggagaggatgatattactcccaatatcaaagtaggtgtacacccccttctgatattgatcgtaatatccagaattaaagatgataacgttactcccaatattgcagggggtgtacatttttgaatactgttcataatattaagagggggaggggatgatatctgtcccaatatcgcaaagtgtgtacacctcctgtgacattgtcccaaatatccagaggaaaaaaggatgttattactcttaatatctcagagagtgtacacctccctgtgatattgtttgtaacatccagaagaaagaggctgatattactcttaatatcgcagggggtgtacacccccgccccgggatattattcgtaatatccagggggaagtggaatgttcagaatgggagaggatgatattacttgcaatatcatagtgggtgtacaccccactgtgatattgtttgtaatatccgggaaaggagaaaatgacattcctccccatatggcaggggctgtacaccacctatcatattgttcaaaatatccagaaggggagaggatatgtctccaagtatcacagggggtgtacaccccgctgtaatattcttcctaatatccagggtgtgagaggataatagtactcccaatatcccagggcatgtacaccccccttgtgatgttgttcctaaaattcatggggagaaagaatattactcccaatatcacagggggtgtacatacactctgtaatattgttgccaatatgcagcaggagagaggatgatattactcccaatatcacaggggctgtacaccccgctgggatattgtttctaatatcaagggggaaaaaggatgatattactcccaatgtcgcagggtgtgtacttcctctttgtgacattgttcctaatatccaggagagaagagggtgacattccttccaaaactgaaaggggtgtacacaccctttgagatattgtctttaatatccagaacgaaacaggatgatataactcctaatactgcaggggggtacaccctctctgtgatactgtttctaatatccaggaggggaaagaaaaatattaatcccaatatcacagggggtgtacattccccctttaatattgttcctaatatccaggaagacacaggatgatactatttccagcagcacagggcatgtacacccctttgtgatattgttcctaatatccaggaaaagagaggatgatattactgtcaatattgcagggcgtatacactggttctgtgatattgtttctaatatccgggggtggagaaaatgatattactcccaatattccagcgggtgtacacccgttctatgatattgttcctaatatctgggggagagagaatgatattattgtcaatatcacaggggatgtacagattccctgtgatattgtttctaatattcacagggggagaagggtataatactcccgatatcgcagggggtgtacactccccctgtgaagttgttcctaatatccagggattgagagaatgatattactcccaatatcacaggcggtgtaaaccccctgtgtgatattgttcctaacatccagaggaaaagatgatgatattattttcaatatcacagggggtgtacgcatccctgtgatattgtttctaatatccaggggaggagaggatgatattattgttaatatcgcagggggtgtaccccaccctgtgatactgttcctaatatccggggtggaagaggataatattgctcccaatatcgcaaagggtgtacaaccttcctgagatattggtcctaatatccagggagggagaggatgatattactttcaatatcacagggagtttacacaacccctgcgatattgttcctaatatccagcggaagaagagttaggataatactattttcaaaattgctgggtctgtaccccctccccgtgatattgtttctaatatccaggaggggagaaagtaatatgactcccaatatcttagaagatgtacaccctccccataatattatttcttacatccagggggtagaggatgattttgctttcaatatcacagagggagtaaacctttccggtgatattgtttttaatatttaaaaagagagaagataaaattactcccaatacaaaggggatgtattgtgtactcccccctctgatattcttttttaatatccagatggagagaggatgatattactttcaatattgcatgggatgtataaatcccctgtgttattgttctgaatatacaggtggggagagtatgatattactccaaatatcgcagggggttctttccccctgtgatattgttcctaacattcagggagggagaggatgatattactcttaatattgcagggggtgtacccacgcctatgatattgttcctaatatccagagggggagaggatgatctaactcagaatatgacaaggggtgtacacacagcctgtgatatggttcctaatatacaggggagaaggggataatatttctcccaatatcgcagggggtgtacaaccccctgtgatactgttcctaatatacagaaggggacagcatgatattgttcctaatatcgcaggaggtgtacaacgccctgtgatattgttcctaatatccagggcgggagaggatgatattaccctcaatatcgcagggggtgtgcactttccctgttatattgttcctatgatccgggtggggggaaatgacattagtcccaatatcgcaggatgtgtgcaccgctcccccgtgatattgttcctaatatcaagggggagagaggaggatattactcccaatatcgcaagggatgtacatcctccatgcgatattgttcgtaatattcaggaggagagaggatgatattactcttaatatcgcagaaagtggacacccaccctgtgatgttcttcataatatccagggaagcagacgattatatgactttcaatatcgctgggagtgtacatcccttttgggatattgtttctaatatccaggaagggagaggattatattactctcagtattgcaggcagtgtacaccttttttgtgatattgttcctaatattcagaaagggaaaggatgatattactcccaatattgcaggtggtgtatatccccctctgatattgttccttatatcaaggaagagaaagaataatattactcccaatatcaaagacagtgtagacccctcctgtgatattgtatttaatatccatggggaaagaggatgatgttactcccaatatcgcagggggtttacacccacactgtgatattattcctaaaatccagtggaggagaaaataatattgctcccaatattgcagggtgtatacaggccctcccccgttatattgctcctaatatccagcggtggagaggatattactttcaatttgtgtagggagtgtatacccccctgtgatatttttctaatatcaaggatgggaaaggatgacattactcccaatatcgcaggaggtgtacacgccctgtgatattgttcctaatatctagggaaggagaggatgatattactttcaatattgcaggagctgtacaccctctgtggtattgttcttaatatttaggttgggagaaaatgatatgagtccaaatatcgcagaaggcatacacacttccaataacattgttcttaatatccgggggagagggtgatattactcccaaaatctctggggggtgtacacccccttctgatatttttcctaatatccagggaaggaaacgatgatattactataaatattccaaggagtgtacaccttcctaatatcctaatattgttcctaatatccaggggtgggagaggattatattactcccgatatcgcagtgggtgtacacccctcctgtgatattgtttctaatatccaagctaggagaaaatgatatcactctcaataccacagggggtgtacaccttccgcatcatattgttcctaatattcagagggaaagaagatgaagttactttcaatatcggaggggttgtacacaacccctgtgatattgctgctagtatccaggaagaaaggggattatgttactccccttatagcagggggtatacacctcccctgtaatattgttcctaatatcaaggctgggatatacgtggggggaaggatgatattactcccaatatcgcaggggttatacaaccttctgtgatattgctcctagtaaccagggcagaagaagatgatattactcctaatatcgcaggaggtgtacactcccccattatgttgttcccaatatgcagaaaaggagaggatgacattattgccagtatcgcagggtgtgtacaccacccctgtaatattgttccaaatatttagggggagagaggatgatattactcccaacatcgcagggggtgtacacacatcccctgtaatatagttcttaaaatctaggggaaaaggggatcttatttctctaaatattgcagagggtgtacactccccggtgatattgttcctaatagccgggagggagataattaaattactttcaatatctcagagagtgtacatcgcccttgcgatattgttcctaatatccagagcaaaagagaatgatattactcccaatatcttaggagtgtacatttaacctgtaatattgttcctaatatccagggggaagagaatagtattactgccaatatcgtaggggttgtacaccttttctgtgatattgttgcaaatatttagtagagggaaagaatattactcgcaatatcacagggaatgtatacttcccctgtgatattgttctgatatccagaaaaagagagggtaatattactcccaatattgcagggggtgtacaccccccttgtgatattgatcctaatataaaggaaggaagaggatattactcctcatatagaaggggttgtccaccccccttgtgatattattcctaatattcagggaagcagaggatgatattattttcaatatcacagagggtgtgcagtccacctgtgatattgttcttaatattcggggggagaggatgttattatgcctgatatcgcagtagaggtacacccctcaagtgatactgttcctaataaccaggggtgaagaggatgatattactcccaatatcgcaggtggtgtacacccccccatgatggtttctaatatacagagggggagaggaaaatattactcccaaaatcgctggaggtctacaccccccttgtgatattgttcctaatatccaggaaaggaaacgatgatattactgtgaatattccagggggtgtacacccgctttgtaatattgttcctcatatccagggtgtggagaggattatattactcccagtatcgcagggggtgcacgacgcccctgtgatattgtttttcatatccaggaggggagattattatcaatatggcaaggggtgaacaccccctgtgatattgtacttaatagttaggttggcagaaaatgatattagtctcgatatcgcagggggtgtgcactccgcctggtgatattgcttttaatatcaagggggagaaaatggcattactcccaatatcgcagggggtgtacaccgctcatgtgatattgttcctaatatccaggtggagagaacataatattactcccaatatcgcacaaggtgtacacccctcctgtgatatggttcctaatatccatgggaggagatgatgatattactcccaatatcacaggggatgtacaccacccttgtgatattgttcctaatatccagggaagaaaacgatgatattattgtgaatattacagggagtgtacacactccctgtgatattgtttttgatatacagggtgggagaggatgatattactcccaatatcacataaggtgtacaccccccgtgatattgttctaaatatttcggtggggagaaaatgatattagtctccatatcacagggggtgtgtgctcctcaggtgatattgtttttaatatcaagagggggaggagattatattactttcattatcacagggggtgtacacccctcctgtgatattgttccttatatccaggcgaggggaaaataatattactctcaatatcgcaggaggtgtacacaccccatgtgatattgttcctaatattaagggggaaagaagataatattactttcaatatcacagggtttgtactcctttcttgtgatatagtttttagtatccagggggaaagagcatgatattactcccattgtagcaaggggtgtacacacctcctgtgatattgttcctaatatccagaagtggtgaggatgatattactcccaatatcgcagggggtatacaccccacctatgatattatttctaatatccatgggaaaagagtatgatattacacccaatgtcgcagagggtgtgtatttttcctgtgatattgtttctaatattcaggcggggagaagatgatattactctcaatatagcagaaattgtacatccccgctgtgatattcttcataataatcagggaaaaagaggatgatattactaccaatattgcaggggggttacacttcccctatggtagtgttcctaatatccaggaagaaagaggatgatattaatcccattatccaggaagtgtacacccaccctgtcatgttgttcctaatatccagcagggaagaggatgatattacaccccccccccgtgatattctccttaatatccaggaggggagaggctgatattactggatatatagcaggggtgttcataccttctgtgatattgttcctaatatccagaaaaggagaggatgatattacttccaatatcgcagaaggtgtacacctccctgtgatattgatcctgacattcagaaggggagaggatgatattactcaaaataccgcagggcatgtgcattcccttgtgatattgttcctaatacccagaagggaacaggataatattactttcaatatcgcagggagtgcacacccccctttggtatggttcttaatatccagaaggaaagagggtgctattactttccatattgcaaggggtgtacaccccactgtggtatggttcataatatccaggcagggagagggtgctattactccccacagtgcggggcatgtacaccctgctgcggtacggttcctaatatccagggggagagaggatgctatgactccctatatcgcggggtgtgtacacccctgtgtggtatgttttgtattctccaggaacggagagggtgttgttacccctcatatcgctggaaatgtacactcccctgtggtatggttcgtaatatccaggggattgagggtactgttacccccatactccccatatcgtggggggagtgcacctccctgtggtatggttcgaaatatccagggtaagagagggtgctattattccccattttgcaggaggcgtacacccccctatggtatggttcgtaatatccggggtgaggggatgctatcaaaagaagagagaaagagaccccccatattgttctatattattttatactcagtacctgttttaagaagaaacaaggaagtgaaaccaaaagcaggcagcccggcgccaggcaccagacccaaaaccagacccgaaaccaggcctgggcctgcctgaccttagcctgatagttaaaattcaacccatgacctagcaaccaatgttatccatagattccagacattgtatggaaggacattgtgaaatttcttgttctgtgctgtttcactctgattaccggtgcctgcagcccctgtcacatacccactagattgctcaatcaatcatggccctttcatgtaagatctttagtgttgtgagcccttaaaaaggacagaaattgtgcactcaacaagctcggattttgagacgctagtctttcgatgcttccagctgattaaaagccacttccttcactacctcggtgtctgtggggttttgtccgcgactcctcctgctacactatgactccccatatcaaggggggtgtacacccccctgtggttcgtaatatccagcaggggaaaaggtgctattactccccatattgcagggagtgtacacccccttgtagtatggatcgtaaaatcaaggggggagggaaggtgtaattatccccatatctcagggggtgtacacccctttgtggtaaagtttgtaatatccagggatattacagggatattatccccaaattaatacttttataatttcttatgcctgcctttactgcaatctctgaacataaattgtgaagatttcatggacatttatcacttccccaatcaatacttttataatttcctatgcctgtctttactttaatctcttaatctcatcatctttgtgagctgaggatgtatgtcgcctcaggaccctgtgatgattgcattaactccacaaattgtttataaaacatgtgtatttgaacaatatgaaatctgggcaccctgaaaaagaacaggataagagcgatgttcagcgaacaagggagataagcataaggtctgactgcctgtggggctgggcagaacagagtcacatttttcttattgcagaaaatgagtaggagaaatatcactgggaagggaacgcattcctaggggaggcctatggacggccgctctgggggtgtatcccttatgtggttgaagataagggatgaaatacaccctggtcccctgcagtgccctcaggcttgctaggattagaaattccagcctggcgaattctagtcagaccagttctctgctcttgaaccccgtttcctgttaagatgtttatcaatgacaatgcgtgcacagcaggacatggaacctcaatagtaattccattttctccctggccttgtgaccttgctaggcccttctgcccttgtgatcttttattgccatttgaagcatgtgatctctgtgacccactccctattcgtatccccctccccttttgaagtccctaataaaaacttgctggttttgcagatcaggtggtcatcacagaacctgccgatatgtgatgtcaccccggaggctcagctgtaaaatttctctttcgtactctttcactttatttctcagaccaggtgacacttaaggaaaatagaaaagaacctactttgaaatattgggggctagttcccccaatagacattgttcctaatatccagaaaaaaagaagatgatattactcccaatatcacaggggttgtgaaccccacctgtgatatggttcctaatatccaggaagggagagaatgatattactctccatattgcagggggtgtgcacatccctgtgatattgttcctaatatccaggggaggagagggtgatattactcccaatattgcaagggttgtaaactccaccctgtaatattgctcctaatatttaggatttagggggggagaggataatattactcccaatatcgcaggggatgtatatgccctctttgatattgttcctaatatccagggggggagaggataatattactttccatatcacaaagagtgttcacccccctgtgatattgttcctaatatccaaaaaggaagaggatgatatcaatcccaatatcacaggaagtgtacaccccccccttttatattgtttctaatatccaggggaaatgagggtgatatttctctcaatatagcagaatgggtacactccccctgggatattattcctaatatccaggggaaaaaaagaggttgatattcttcccagtatagcagggaatgaatacaccctttgtgatattgcttctaatatcaaggggaaaagaggatgatatgactcccaatatcacaggggatgtaaacctgtggcgttgttgctaatatcaaggagggaagagtatgatattactcctaatgtcgccgaaggtgcacactttccctgtgatattgttcctaatatccaaaagggaagagaatgatattacccccagtattgcagggtgtacaccacccctgtgatattgctcctaatacccaggaaaaaagagaatgctattacccccaatatctaaggggacgtataccttccctgtgatattgtttctaatatccaagtggggagaggatggttttactctcaatattgcagggagtgtacactccccctgtgatactgtttctaatactcgggctgggagaaatagtattactcccaatatcgcagtgatattgtttccctgtgatattgtttctaatatctagtgggggagataattatattactaccccatacacaggggagggtgtacattcccctgtgatattgtttgtaatatccagggaaggagaggatgttactcccaatatcacaggggttgtacaccccttttttgatattgttcctaatatctggggggcagagaattatattactgtcaatatcacagagtgtgtacaccccctctgttatattactctttatattcagggcggtagaggatgatattactccctatatcacagggggtgttcacccctcctgtgatattgtttataatatctaaggggaaagaggatgatatcactctcaatatcaaaggaaatgtacacctttcctgtgatattgtttttattatataggggggcagaggatgatattaagaacaataccacaggggatgtacacccacgtattgatattgtccctaatatgtatggggaaagaggacagtgtaactcccgatatcgcagagtgtgtacacccccttgtgatattgtttctgatatacacggggagaaaagataatatttcttccaaaattgcagggggtgtacaaccccctgtgatattgtttttaatatccagtgggggagagaatattactcccaatattgcagggcgtgtacacaacccctgtgatattgttcctaatatccagagtaggggaggatgacattactttcaatatcgcaaggggtgtacattcccctgtgatattgctcctaatatccatgaggggagaggatgatattattcctaatatggcaggggctgtacaccttccctgtgatattgtttctaacatccagtgggggagaaaatgatattactccctatatcacagaaggtgtacactttccctgtgatattgttcctaatatccagaaggggagaggataatattactcccaatatcgcaggaagcttacaactcccctgtgatattgtttctaatatccagggaggtagggatgatattactcccaatatcgcaggggatgtacactcccccgtgacattgtttctaataaccagggggtgagaggatgatattacgcttaataccgaagggggtgtacacacccttgtgatattgtgcctaatagccagggggaagaaaattatattaattttaatatttatggggaaaaaggatgatattactcccaatatcacaggggctgtacaccgaccttttgatattgtttttaatatccagaagagaagaggataatattgctcccaatatcagaaaaggtgtaaaccccttctgtgatattggtcctaatatccagggagggagagaataatattactaccaatatcacagaaggtgcccacccccaaggtgatattgctcctaatatccaaagataatagggtgatgttactcccaatatcacaggaggtgttcacaccccttgtgatattgtttctaacgtacagggaagggagaggatgatattattcccaatatcacaggaggtgtatactcctctgtgatattgattttaatattcggggggaaaggatgatattactccctatatcgcagagggtgtacaccctctgtaatattgatcctaatatccagggcgggataggatgatattactcccaatatcgcagaaagtctacacaacccccagtaatattgtttttactatccagggggaagaggatgacattactcccaatttcacagagtgtgtacactcaccatttgatattgtttctaatatctagggggagagaatatattactcccaatatcacaggaattgtacaccacctctgtgacattcttgtgaatatccggggaaaaagagaataatattactcccaatattgcagagcgtgtacacccctccatgatatcgatactaatatttttttaaagaggatgatattactcccattgtcacaggatgtgtacaccccccttgtgaaattgttcataatattctggggggagagcataatattactccccatatcgaaaaaggtgtccaccctccttataatatggttcctaatatccaggatattacttaatccaggatacttgtaataccctaaatatacaattgcttgaacctccacctcccaggttcaagcaattcttctgcctcagcctcccgagtagctgggactacaggggcacaccaccacacccagctaatttttttttcttgtatttttagtagagatggggttttgccatattggccaggctggtctcaaactcctgaccttgtgatctgcccacctcagcctcccaaagtgctgggattataggcgtgacccaccgtgccaagccaggaagaggatgctctatagatttccccaataagagatggctttgcagggccattccaaaatatgtcaaagaaatacatttggggataaaatactttgatttcctttagggaatgttatctattatgtgatgctataccagagtcaggttggagtcggttatcttattgcaacaaagagtctgttccgtcactgttgggatctctattttttcctcttatttcttgagacagggtctcactctgtcacccagtctggagtgcagtggtgcgatcttcattcactgaaacctctgcctcctgtgttcaggtgattctcgtgcctcagccccttaagtaactaggattacaggtgtgcgccaccacacccagctaatttttgtattttcagtagagatggtattttgccctgttggccaggctggtcttgaactcctggcctcgtgtcatctgcccacctcgacctcccaaagtgctgggactgcaaatgtgagctattgtgcccagccaggatctctgttttaatgttagtgctggtcactttgcatgaactccaaagggaagaaatataatgaggtgtgtctgaccccctgccttctcatcgtgacctgaattagtttttcaggtttgcaggggatacccttggacaagaaggggctctattcggttggttggggggattagaattttactttttgtttacaatatttctcctgaaagagttaggggctcacaaggaatttccgcgtgagcaacttatgaggaaagccatctgggaagatatgtgtccttgtgtcactgggatattctcgtttaccccaatgatacggcaatgacgcagggttgtgaaattacagctatgtgtttggggaaaaaagaaagcaggattgtgtgactacgtttccaaacttcacttgcccttagccatagtgagttgggggcctggagattctgttttctttcacaatgatatagatacaattaaatgtatagaaagcaaaaaaataaaaaggtgagtaatgaggaacctctgattcctgagtggccatgtagttacccatggcacagagccacagttactgaaggtaaagtttgctggggaatttagaaatgaatccagctcttggaggagtcagtttactggatgcctaagaaaatgcaaacaaaataagaaaaaagggtaatattcaatcccatagttattgttacctgtcatagctaaagtaaaattaaaacagagtgctggcttcaatcttgatgctacactaagcttagatttcagtgaatgtgagtctcagccactagctcagagccacctcccaaagaccaaatcatgtagggacaatagaaagtacttctgagaattgtggttaccaagaacctagtaactgttggggaggagcaaaacaaagtacagaaaccagagggtacaatctgagtgagactgctatcagcttctggaggagcctttactaaaatgaatgatgagagtaactggatgatgagagtaactaatggatgatgagagtaagcaatgtctttggttttcttttttttttttttttttttttagcagacgtctcactcttgtcgcccaggctggagtgtaatggcatgatctcgcctcactgcaacctccacctcctgggttcaagcaattctcctgtctcagcctcccgagtagctgggactacaggcactcatcaccacacctggctaatttttgtatttttagtattttctggtgagggtccaggtttccggaaacaactcagagacatatgttaagatgttatctttagttttcacagggaaccaaatatgttacgactccaatttccttggctattgttttaagttaccattaccttctcgttgatcaagttgctcatttacttctcaagcctagctagatgcctggaatttcccttgaaggaagtcaagattttcctttatctccatactggctgatggtgatcgagtaagcccctaagaggggtccctgctccatctcgagatgctgctagattctacagtgcctaataaacagctctcgcctggccgacaaagagctgcttgctctctggatagcaattccaaagtgaacagacaacatcctgtttggaagactgccactctgttagaagaagcatcaggaaaacctttcttttgagctatttataactaacagcaattgaccaagtatacttttgtgagtgaaactgacctttctccctgtaagaattctccaaaatttggaaactatttgtgagtatttttacttatggcaatataattattggcacaagctcaatcagattcggttttctttcgtaacaggaaccattggagatactcattactctttgaaggcttacagtggaatgaattcaaatacgacttatttgaggaattgaagttgactttatggagctgataagaatcttcttggagaaaaaaagactgggtatattttcaatatgctttccttttaaggtccctcacctgtggaaagtaaagaatgtcactttctgacaggctcaggaacctcaagttatgtagggatctcaagaagatgggggaattcacccagttcatacaggtgaaattgctgttgcaaagattatgaatatgagagaagtccagcatggctgacttcatctcgtgtctggcctcaggctggctgcccttgctcactcttgggcataggccaagctagccatgggaggaatttagtttatagtttaactttgaagcacggatgataatagtctctccctaaaatgaaccccttccttgctcagggactgaaactacctttgtatgacaaatgaaagcccacaagattaagattatgagaggggcctgaattctgctaaaatgcaggtgtagctgactgataacaagtcattgtcccacagcttgcctttctataatctcttgcttctcaggagtcacatggccagaggtcctgagatttccagtcctgtgacccccacccagagatggacttagtgcatgaggaccattttccacacccctatgatttcatcctcaaacaatcagcagcaaccattccctagccccctgccttccaaattatccataaaaatcctagcctctgagttattagggagattgattaataatcccagtcctaccccttgggttgctctgatttaattaaaccttctctactgcaataccacggactcagtaaattggttttgtctgtgcaatgggcaagaagaacatgttgcatggttatacaggtactacaagcacagtctgatggcaaattattggttttgcttcctgcccttgatgtttctaaacatctagtccaaaattacttgtgaaaggtccagcaaagccaattttaaaagaggctatatggccaatcactattctttctacacattattgcaaataatcaggccacggctgggcacggtggctcatgcctgcaatcccagcactttgggaggctgaggcaggatcacctgaaatcaggagttcaagaccagcctaggcaacatgataaaaccctgtctctactaaaaatacaaaattagccaggcatggtggcatgcacctgtaatcccagctacttgggagactgagggaggagaatcacttgaacctgggaggcagagattgcagtgagctgagatcacaccactgcactccagcctgggcaatagagtgagactttgtctcaaataataataataataatcagaccaagtataatgaaattaaaatttattttgcaaataaattggtcctactacaatttatccttcatagaaatgtggaaactgaagataaaaaaaattaggtttcagaagaaaactatactacacctgttattagattctagccctaaacattgtttttgaggtttttattatttacctgcaatttggtctaaattctgaattatttcctgactacaagtatccaaggaataaatgggttttctttttctttatgatagttttagttggcttctaatgcaacaacaatttttattgtaatcctgtgtgcattctattcctactattcaaattattaatgttatagatctttcattgtagtacttctgaattaaccaaaatcacagtattctgaagatgattctacaaagcctgctgtttctacaaaggctgctgatgatttctacaaagcctgctgtagtgttgctgtggcctctgcttaaaaaagtagaaaacacattgatgcagcatgttcaccccaacctccctgcctaaaggctcagggaccatcttggaagaggaaggcgcgtgagattgtaagagccgaattagggggatggagtgtggagaataaggacacttcatcttggatgctcacctgccaaattgacttctgatgaaagccagctccagaaatgtgcctacagttactactttcacctaaaccctgcccttagtcaaatccttctcttcttctaagcaatcaacttcaattccttgtataacccacagtataaaagggcttttataccattctatcctattgcatgtaagccttgggtctgggaggtaacagtgtgggattccaccatctcatctccctgccacccaaacatgcctgctcttctttaagcaatattaaatgtttgtacttcagaaatttgatttgtcagcctcttcttcagactctcagcttctttggcctttgggagtaaatttgcataggcctgctcaaaacaggatgttctgggggtttgggggtgttgttttgttttgttttttgttttgtttagagacagggtctcactctgtcacccaggttggagtgcagtggtgcaatcatggcacactgcagcctcaaactcctaggctcaagcaatccccccaccttggcctcccaaagttctgggattacaagcataagccaccatgcccagccctggacttttctttaaagacatttacacagtgtaggaattactgtgggtgcactgctcaggtccccttctccaggatgctcattcctacctcatagatgattttcctgcagagatttgacctcagctgaagggcagtcacctggtccaggtggttgctattcacctccttcctgagaacagccaacagccagggacacgctagcacagagatataagagcgaccaaggtgaggccccttctgtgctgcggtgcatgctccagagcctccctgggatcagacttaagagggtctccagccagatctggtcttcgctgctttcctcgagctccccagcgcactcctgcaatgcatcttttttttttttttttttttttttgagacggagtttcactcttgttgcccaggctggaatgcaatggcgcaatctcagctcaccacaacctctgcctcgcgggttcaagtgattctccttcctcagcctcccaagtacctgggattacaggcatgcaccaccacgcccagctaattttgtatttttagtagaaacgggtttctccatgttggtcaggctggtttcgaactcctgacctcagttgatcctcctgcctcagccttccaaagtgctgggattacaggtgtgagccactgtgcctggcccaatgcacctcttgaatcacctcctcatgctttgcttttagagaacatgatccccaacatgtgattccagcaaagattctagaaagccaaccgtgacaatcacttctgggtttagatgacccccccccaccacaagatggcagtgagcacctcatcacagaggtgctgatggtctgcagcaccgcgccaggccagaacgtgccttttacagaagaaaataacccagtagctgactaggatggtgaggagggctggtgagcactgcggtagtgagagggacactagcatcactgagatgcaagtgatggtcatttttcataggtcaaagctcaaagcaggggacagttacagggcagggcttcatagcaccagtgtgatgaaagtatctgggagtggctaaggccagcactatgccatgggaagcaaggtgggcctgaggaggaggcagcagcgtcagcctgcaacaagtgggggctgccctgcagagacctaagagtcatgttatagagcacagtgtctgtaaggccaagaagtgtggacagccaagtgtgtcaattactagacatactcaagaggagcaggaagggcagggcatggtggctcatgcctgtaatcccagctacttgggagactgaggaaggagaatcgcttgaacccgggaggtgaaaattgcaatgagccgagatttcgccactgcactccagcctgtgtgatgggagcgggactccatctcaaaacaaaaaaagaaaaaggaaaaagaaaaaaagaaaaacctaggtatacttctcaagcaaataaaaataatcaaaaccaatatcatgcccgggcacaaatttcatatatataacagatttaaatatatgagggtgattatcctctcatatctccatttttttttgtttttccatttttttctttactaaaaaaagttaatgccaatgacacacaatttttttttttttttttttttttgagatggagtctcacttcttcgccctggctggagtgcaatggcgtgatctcgactcactgcaaagtctgcctcctgggttcaagcaattctcctgcctcagcctcccaagtagctgggaccacaggagtgagccaccacacccagctaatttttgtatttttaatagagacggggtttcaccatattggccaggctggtctcaaactcctgatctcaaataatctgcccgcctcggcctcccaagattctgggattataggcgttgagccactgcgccccgcctatgtatgattttttttttaattttattttcataagtttttggggaacaggtggtattttgttacatgagtaatttctttagttgtgatttgtgagattttggttcacccatcaactgagaagtatacactgaacccaatttgtggtcttttatccctcacccccttcccaccctttcccccggagtccctgaagtccattgtatcattcttatgcctttgcatcttcatagcttagctcttgaacccttactttctgtttgagggagaagacatatcatctacaagtagatactgtgtaaacattccattgcatgactatcccataacttatttattatttgtgtttggttatttgctgctatgtaacaaccccactcccaactaaatggtgtgacaattccatgattctgtggatcaaaaattctgaaaagtcaaacccaaggagttttgtctctgctccatgatgctaaagcctccgcaggggtgaggcgaatggctcagggtgactgaaaagctcagggttggaacagctggggatgaggcctctatgtataagatgattcttcactcacaggtctgaaactatggtggggacagccagaaggctcggctcagctgggacagtcacctgagccctacacatgacctctccaacatggtgatcctgaagcagttgggtttcttacacagcatcacacttttcttttttttttttttttttgagatgaaatattgctctatcacccaggctggagtgcagtggcacgatctcagctcactgcagcctccgcctaccaggttcaagcgattctcctgctccagcctcccaagttgctgggattgcaggcgcctgccaccaagcccagctaatttttgtatttttagtagagacggggtttcaccttgttggccaggctagtcttgacctcttgacctcaggcgatccgcctgcctcggcctcccaaagtgctgggattacaggcatgagccaccgcgcccggccaaagctcacacttcttatgattcagccttagatgtcacatcagttcattttccccacacttattagtgttagaagtcacaagcccacccatactcaggggactggcacacagaccccactctcaatggaaggggtgggacaccaccattcctgctgatgggcatttgggtaacttcctgtttgaagctattaagattgggctgctgtggccgggcgcagtggctcacgcctctaatcccagcactttgggaggccgaggcgggcggatcacgaagtcaggagatcgagaccatcctggctaacacggtgaaaccccgtctttactaaaaataccaaaaaaaaaaaaaattagctgggcatggtagcgggcgcctgtagtcccagctactcgggaggctgaggcaggagaacggcgtgaacccgggaggcggagcttgcagtgagccgagattgtgccactgcactccagcctaggcgacagagcaagactccgtctccaaaaaaaaaaaaaaagattgggctgctgtgactattctagtaggtgtctttggtgagcgcctacacgtgtttctctttttctctttagtatatgcccaggaggggaactgctggctcccagataccgtatgttcagggtcacacacacttccacagggttttccaaagcccttgtaccagcacgcactcccagcacctgtgtgactgctccagctgtcccacagtctcatcagttctattgctgatattttcattttagcttaagttatatttaataggaaaattaccgttgcctctgccccccgttcctgcctgtaggagtttctcgtagctgttgctacaggtggccacaaatctgtcacttaaacccacacaaattgatgtccttatggctttggagtcagaagtgtcaactgaaggtactagcagggctgtactgacctggtggcctcagggagcatctgtgctgcttctccaccttctagaggctgctgcatccctcgctccagccccttcctgacaccactcaccctcctacttctgttatcacatcctcaccttctctgtgttcagggctccctctgtctctctcttgcaagcacacttgggattccattgagggccacccacataacccaggagaatttctccacctcaatatccttaacaactgcagagcccttttgccataaaagttaccattcacgggttccagggattgtgacatgggtagctttaggagtgattattcctgcctgtctcccgctcaccagaacttggactttctctctcaacaggagccccctgtgtgggaatagcctgtctcaacgacgccctctataaggacctgcttcctcaaaggacctcatagtcgggtcctgcccctcagtgtccagtctgccttggctggaggggctgcaggggtgtgttggcgccacctggtggagacagggcatcacagcaggtgggagcccagtagaagcacaaccaaaacatgggtaatgtttaaaattttctggctaagcgctgtggctcacgcctgtaattccagcactttgggaggccgaggtgggtggatcacatgaggacgggagtttgagaccagcctggccaacatggtgaaacatcccctctactaaaaaatacagaaaaattagctggacatgtggcgcgctcctgtaatcccagctactcgagaggctgagacacgagaatcgcttcaaccccggaggggttgccgagatcgcgccactgcactccaggctgggcgatagagcgagactctgtctcaaaaaaaaaaaaagaagaggggaggcgaggggaggggaggggaaaagggggaatttgtttggagctgagacatccatcttctcctgacctcagatatttgcactcctggttatgaagccttcacacttggactgaatacaccaccagctttcccgatttccagcgtgcaaatggcagatcgtgagacttctcagcttccataattacatgagccaatttatatatataaattgggtcctccagaaaaacagaataaattatatatataattatacgcataacttaattaaattatacgtataacttagctatatatataatttattctgtttttctgaagaaccctactgacacaaatgttgagcatcttttcatgtgcttattggcttaataacttgtacatcttctttggggaaatgtctattcaagttctttgcccattttgtaactgaactattaatatttgtctttacattgttgagttgtaaaagttccttatatattctagatactagagccttatcagatatatttctgcaactattttctcctaatatataggttgtgtttttattttctttttctttttttttttattgagacagtctcactctgtcacccaggctggagtgcagtggcatgatcttggctcactgcagactcgacctgccaggctcaagcaattctcccacttcagcctcctgagtagctgaggttataggcacttgccatcgcacccagctaatttttgtattttttagtagagccgaggtttcgccatgttgcctaggttggtcttgaactccctgcctcaaagcgatctgtcagcctcagtctccctaagtgctggaagtacaggtgtgagccacagtgcccggccatctattttcaatagtgttttttgatgtacacaggtttggaattttgataatgttcaattcatccatttttttttttttttttttggttctttctactggaccaccactcttgagccctctaatccaacctccacgcggcagccagagggagctctctaaatgtaattactctttccctgctccacctgctcaaaacagtgtcacatttgtgatttaaaacagtatttctcaaacctaatttgcaaacaaagcaggtggaactcttcttgtatgcacagcatctgatttggttggtctggcatgggtctgggagtgagcacacctaccaagcggctgctggggtaacttgcgttttccactgatgatttcagcaatgtttccggtcccacatgctcctccagaaccttgtactcccccatgaaaaggtggagtccatttccccttcctttatttatttttttgagacgaagtttcactcttgttgcccaggctggagcgcaatggcgtgatctcagctcaccgcaacctccgcctcctgggttcaagcaatgcttctacctcagcctcccgagtagctgggattacaggtatgtgccaccacgcccagctaattttgtatttttagtagagacggggtttctccatgtcggccaggctggtctcaaactcccgacctcaggtgatccgcccgcctcagcctcccaaagtgctgggattacaggcgggagccaccgcgcccggctatttccccttcctttgaacctgatcaggacttgacgatggcatcaacatggtgagagtgaccctgcatggcttatgaggctgggttacacaaggcgatgttgcttctgactggctccctctcaggatacatgcccttggaacccatcctctaagctccttgggagcccaacttagcccatgtggagacaagacagggagagaaacagaggcacccccagccctcagccagcatcaaccgccagacaggagagcaaatgcgccaacaatgattccagctgaagcctcagacagcgtggagcagagatgagggatccctgcagattgcagatgcgtgagcaaaatgcatgctgtcactgttttgaaacaacaatgtctgggggctgtttgttatgcagcaatagacagctgtaacaatgctgttactgctgtattccatgaatgactgcactttgagtagcagggggctagatcactagataagccccatggcttctgtgtatgctatttttctacttttatatccttttcattcactttttttttttttttttttgagacagagtctcactctgttgcccaggtgggagtgcagtggtgcaatcttggcggactgcaacctccacttcccgggttcaagcaattattgtgcctcagcctcctgagtagctgcgactatagatgcacccccatgcctggctagtttccgtatttttagtagagacggggttttgccatgttggccaggctgatctcagactcctgacctcaggtgatccacccaccttggcctcccaaagtgctgggattacaggcgtgaaccactgcacccagcctcattcactttctttacttggctcatttttccttgttgcctcaattctcctctaagatcactttcctgacatttcagcctgggcctgttgccttctctgggtcccctccgcctcctgtgcctcccccatctcagccttgatccctcagattatacttcctctgtccccaccctgaccatcttggctgtccctggatagggatgggtatcttctcccactggtctgggagatctggaaggacaggcctggaaaagacttggtcactgctggaaggagctcagttagtgtggtgctgaggacagtacgggtgaggctggccccttcacccaaactcccactctcttccatagatttcacctctgtggcccaggccataggattagggcaactccccttaaacatcgagtccatcctccaagctgtccttttttttttttttttttttttttttgagacagagtctcgctctgttgcccaggctggagtgcagtggcgcgatctcggctcactgcaagctccacctccagggttcactccattctcctgcctcagcctcccgagtagctgggactacaggagcctgccaccacacccggctaattttttgtatttttagttgagacggggtttcaccgtgttagtcaggatggtctcgatctcctgacctcgtgatccgcccgcctcggcctcccaaagtgctgggattacaggcgtgagccatcgcgcccggcctcatgctgttcttgaatagtgagcacctgttacaagtcgccccaccagcctctcacttgtacccccctcatctctttctccccaagagacagaggaccctggcacttgtgaagcatgacccagaccctggggccatggcatccaacatcctcattccccatgacccctactgtctagatgtagctgccaagagacccccagactccccgggcctctgtctagagtgccaagacagagagagaatgccctgccgcttgcatgctttgtggggtgtccttcccccttccctggctgctaggcgtgacttcaacgttctccccaacccccaaacagcagcactgacaccagctgcagacctggctcaggttagctaatgaggaccaggctggggatggagcctgaacccctaaaccccagtcctgtaccccaccctaatcctggggtctccactggacaaaacgaagcagcttggtttttcgttgttattgtttttgagatagagtatctctctgtctcccaggttggagtgcagtggcgtgatctcagctcactgcagcctccgcctcccgggttcaagtgattcttgtgccgcagcctccccagtagctgggattacaggcgcgtgccaccacacccagctaatttttgtatttttagtagagacagggtttcaccatgttggccaggctggtctgaaactcctgacctcaagtgatttcccagcctcggcctcccaaagtggaagcggcttatttttaaggagaaaactcccgtggaaaggaatcagcacctcctctgtcaacatttcacttctctgaaaagactctcacttccaacagaaagtgctttgtaacacaacaatgaggctgggcgaggtggctcatgcctgtaatcccagcactttgggaagctgaggcgagtggatcacgaggtcagaagttcgagaccagcctgaccaatatggtgaaaccccgtctctactaaaaatacaaaaattagttccgtgtggtggcgtgagcctgtaatcccagctactcaggaggctgaggcaggagaatggcttgaacccaggagatggaggttgcaatgagccgagatcacgccactgcactccagcctgggcaacagagtgagactccgtctcaaaaaaaaaaaaaaaagaatgagaacatatggacacagggaggggaacaatacacacaaacaaaatttagaaacaggtgaaaataattttagtaatatttttactaatactgatatgctcaaaatattattatttcaataagtaatctaaaaattattgagatgtcttatgttcttttcatcatactaagcctttaatatttggtgtgtattttacactcacagcacatctcaatttgcagtccccatgtttcaagcactaaataaccatgtgtgtccggtggctaccatactggacagcgttgatctgaaatcgcatctgtatgcatcaccagcatatttgcagagatccccatctcagcagcacacctgaggctcatctgcgaaagcacctgcaacttctctacaacctcccacatcacctccaaacacatcctcatgtcatctgcaaacacacccatagctcacaggccaatgcctaaatatcattgcaggcaccttcagagaaagcacttactaaaggggtatacttgattccacatctgctttgacctgcaaatctcccttctcctttacatacatttgcatctcatttgtatgtcaatctaaatccactggcagagcctcagatcatcatctcaaagtcaggtggatgtggggctgggcaggcctccaggtgttcctcctcctgcttcctctggggctcttgatcctcctcctcttccttgctgctctcctcctcctcctccaatatggtgaccagttcctcccgcagcgcccccatctccagccccaggctgcacagctgtcccagcagctggacatccactcggcgcaggttcccctgccagtaggaaggggacgtcacagggatgccaccccagagagcaaggggtctctccaggacctgggtgagagcaggtcccaactcatgtcctggccacagcgcctgggcagggtcctcactgtgcccatggaccctaactgccttcctgcttctcagagtgtctcttgatctctaactcttctctttgtctctccatttcattgtccctgacttctctctctctgtctcctccctctcttatctatatctgtccctgtttccctttgtctctgtccccatttattttttgtctttccatgcccctgtctctctgtctttatgtgttgccatttctctgcccctgcctttggctctctttctctcgcttgccctctctctgccctccccaactttctcaaattcagtctgtctctccatctctgttcctgctctccgtctctgcttcccacctctgtccctctcttttgggatctccctgtccccacctctgttcccgtccctcactctatgtctgtctctcggtgtctgtacatgcctctcatgtctctgcttctatctctcagattctgtttttcgatctctggccttctctatttttgttcatttccattcattctcatttcctctctttctctttcccttccaaacccctcactcaccagctcctccctgatccacagcagactatcgcaggcacctccagtgtctgcccctgcagtcctgagggtctgaccagggatttccactggggagacctccctcagggcctgggggggtgggcccagccccggaggcaccagtccagcctgattcagctgcctccacagttccatcgtctctgagctatggctgcaaggagcaggaagtagcaaggtccagggtggcctggtcccctggggagctgtgtgcgtggtggagagtaaagggcagagggagtgggatgggggttcctgggaaaggtatcccaaagtccactcttcagagagaatcagctggccttgtgcttttctttttccttctgaagtctaacctcaactctgctcacagggttcaaacatagcctcttgcagaggtctaactccacccttccctgcctgtctcaggcctgacccctcaggggcgctcagtgtctgtagatgcctggcaccctctgtccttccacctgccccccaccaccacttctccagcctctcctcagcctccatttgacctctggcttgcccatagcttggtccttgcttgtcctcttggcacgggtcatcctagggctttcccaccagtgtgcctttgggggcaggaatggctcccaggggcaccaagacagcaatcccttagctggagtgcctgtgtccaggctgctggcctagggccaagcagccaattctgctgaccctggacttgcctatgggtatattatccctgttgagggtgagggcttctgctgtggaaaagtctgggaagcactgcaggcctctctcggccttggacccttccttcagacccaaggtgcatatatatacatatatataatggtagatcacgaggtcaggagatcaagaccatcctggccacatggtgaaaccccgtctctagtaaaacacaaaaaattagccgggcatgctgccgcgtgcctgtagtcccagctactcgggaggctgaggcaggagaatggtgtgaacccaggaggtggaggttgcagtaagccaagatcacgccactgcattccagcctggcgacagagcaagactccatcttaaaataaacaaatgaacaatatatatatatatgtattttgttttttgagacagagtctcgctctgtcatccaggctggactgcagtggtgcaatcttggctcactgcaacctccgcctcccgggttcaagcgattcccctgcctcagcctcctgaacagctggggttacaggtgcacgccaccacacctggcgaatttttgtatgtttagtggagacggggtttcaccatgttagccaggctggtctcaaacccctgacctcaggtgatctgcccacctcggcctcccaaagtgctgggattacaggcgtgagccaacgcgcccagccccaagtcccttttaccatagaaagtaacatagtcacagtgcccagggattcacaggtatggggagagggttcgttattcagctgccacacccaccttcctaaacctgctgcccttccagtttcctcacgtgcacagccacgcccgtctgcttttagtttctcaatctgttggcttaaccttcaaaacaggcccaggatttgagcacttctcaccattccctctgccccatccccattcatctcttgcctagactgctacagcagcctcttttactggtcccctgcatccacccttgccctctaaggcaagggtccccagtccctgggccaaggaccagtaccagcccctcgcctgctaggaactgggccgcacagcaagagatgagcagcgggtaagtgagcattaccgcctgagctccgcctcctgtcacatcagcagtggcattagattctcataggaggcaaaccctattgtgaactgtgcgtgcgggggatctaggttgcctgctccttatgagaatctaatgcctgatgatctcaggtggaacagtttcatcccaaaaccatccccaccccacccccgacccccagtctatggaaaaattgtcctccacgaaaccagtccctggtaacaaaacggttagggaccgctgctctaaggtacattctccacctggcagaaataatctttacaaaatgtaaatccgattttgacactcccttcttcccactgtgaatagaataaaaccctaccaggcctgcaccgtcagcccctgcccacctctcaacccagtctcctatctctgtctgcaagctggttcccacctcaaggcctctctgctctagaggctacctctccctgcagcgcttttcccctagatctttgaatggctctttccttatcattcacttctacttcaatgtcacctcttcagagaggcctttgctgatggccctacacccagtcacttttttttatctgcttctcatcaaaattgccttgctgattcctttgtttcttattcatcctctcccacatccatcctctcccagcccagaatgttgacttcctgagagagggactgggtctgtcctgctcaccatggtaacctcggcatctagaacagtgcctgccatcacgtggtaggtgctcagtaaatattcttggaactaatgaatgaataattctatccacaagacttcacaatggctcttcatgctgcgatctagctttcaactccaaactggtcttgagatctcacctcagtctctaaccttgacatctaacctcttcacccactctcttacctgaccctaatttttaaaaatgacgtggtcagcttttcagccccctcattccctgtttttaggaggtagtgagtggaagctggaagaataagaaagcttggggagactgcaattgcagtcaggaaagaaaggtactctgccgggaagaacaccccatcttctcctagggaaagattgtggagtcctggggtttgttttgtttttcaattttttgttttaagagacagcgtctcgctctgtcacccaggctggagtgcagtggcgcaatcacagctcactgcaacttcgacctccccggctcaagtgatccccccgcctcagcctcgtgagtagctgggaccacaggcgtgcaccaccacgcccggctaacattttattttttgtggatataaggttgccctatttctttgtggagataaaggctcccctatgttgcccaggctggtctcgaactcctggcttcaagcgatgctttcgcctcggcctccacaaagtgctgggttcacaggtgcgtgagcccgacctgtgtctcgttttgaagctcagggagagggcgctgtgagcaatccctaaaccctttaagagtaaaaagtgcgtgcacctttaagaggacggttagaaaacgcggggcgtggccacaggagaataagttcgcgctgaaccaggagcgtgggataagaccggccccttccggttacgaaaccttagcaagatggcggctccctgggcgtccctgcgcctggtcgcccccatgtggaatgggcgtatcaggggcatccatcgcctgggtgcggcagtggccccagagggcaatcagaagaagaaaaggacaatactccagttcctgaccaactatttctacgatgtggaggctctgagggattacttgctccaaagggagatgtacaaggtgcatgagaaaaatcgatcttacacctggctggagaagcaacatggtccatacggcgcaggtgcctttttcatcctgaagcagggaggcgcagtcaagtttcgagacaaggagtggatcaggccagataagtatggccatttctctcaggagttctggaatttctgtgaagtgcctgtcgaagctgtggatgccggtgactgtgacatcaactacgagggcctggataacctccgaacctccgcaggctggacatctcggacctccctgccgtgtccaaccctggcctcactcagatattggtggaggagatgctgcccaattgcgaggttgtgggagtcgactgggctgagggcctgaagtcagggccggaggagcagcctcgggacacagccagccctgtccctgcctagcctttagccctgtccccactcacgtggcttctcagcgggctgcatggaatgtctggtagctcaccacacttctggcttccatttgtcttcactcaacgtcagggtgggggagtggtgctggccaatcacaggagagagcgtgagttcccagtatttattcctggctgcccttggctaaaggtcacagctcctgtcaccctgtcaggcagccctttccatgcccctgttcaggcctggggaggtaaaggctcaggctgttagtagccgcagagagccacactcaccttgtcaggagactcttctcaaactgtccttatgtgagtgcactgccatttcttgcagggaccctgactgacacaggggctactactgacactttacagggatggttctcccccgtgcagggccgctgtgcccactgcaggacatgcagcatccttcgccccactccactcactaaaggccagcgcaccccaggccccatagtattgctggttatggatttattgactttatgttccaaattcagctttttcagttggctgttttttgaaaggggataagctttgtcagtagagggcaccgaacaggcattataggaggaaaggcgcctccttcgtggttcttgttggcctccactgaggcacctctctgggaataacgttccccagcaccccaaatggatttccagtcaattcagaagcattttaccagtgaagccctcattattccagttcactgttaaagccagtaattctctatattaaactttccctgttcggtttatactccggagtataaaccgaacaggggtggccaagctgctgtgggccgccgccgtgcagaaccgctggaactcacgcttggggcgacggctacagttggattttgcccctgcaggcaggttcggtgtcgatactggcgttgatagcgctgctgccgtttgacgtggcgaatatgggcttgtttctcggcctgatcgccgtgttgtcgtagttcgcagccacccagga

SEQ ID NO: 735311 - DNA, 188215 bp, Homo sapiens
ctccaaggctgagggatgaggagacctgctgaggacccagggccttatctttccatcccactccataggtcccagtattgactgatgctgtcttcacctcctagcctcacttttaaccttctggcacccgcccaccactgtccagttcactattgaagccctgccgtccagtgctgcagagggaaaggatgttcttctactggcctgcaatatttcagaaactattcaagcctattattggcacaaggggaaaacggcagaagggagccctctcattgctggttatataacagacattcaagcaaatatcccaggggccgcatacagtggtcgagagacagtataccccaatggatccctgctgttccaaaacatcaccctggaggacgcaggatcctacaccctacgaaccataaatgccagttacgactctgaccaagcaactggccagctccacgtacaccgtgagtgattcccccatacctctgggtgctggcggtcagttctgcttcacacacatgagattgtcaggcctgggctgtgcctgcatccccctctgcattttgtcccgtgttgagatttgggcatttagtgcaggacacacacatggtaggtaaacttcaacagatcagaattcctttcctgcatccaggccctgcagacactgatggcgggggcgggggggcctcagcagggggaggtcagtctcagccaagcaccccatgccctccccatgaacctgaccctgagaaagaccctggagaactgggtcagggcctggcctgagggcgtcctgggaacctcacaaaagcccagcctcaggactcctgactccgtgtgaccccgggaagcctgtgtcagggctggggtgtggtctcctgggcagggcttactgggagcaaggatttaccagatgtctgcgggctgtggttcctgaagcttctcatcagtgagggctcagctcccagagtctcatctagacaaggacagagcctaccactttccctgggactcagcctggagagggcagggggacaggattactagggcattggccccctgaatgaggagcttaagagatgcccttgggcagtcagtggcccaggggtaggaacagaggggagaaaatgttcctggcagcttcttgtccaccggggatcatgcccaggggtgctctcccatggaggcaaataacagatgctgttgatgtgaacacctcctctgtgccaagcttcatgtcagatcctgtgaataatttaaagttcattcacagacaaagtggcaagcctcagaccattttccatttacatattgtatggaggggaaactgaggcacagagagatacagacaccggccacggtgggcagatcgcagctggcagagtcacatgagggctgtctgcagctgctgccacgtcctctccttcatccctggtgccttactaggtgtctgtggaccttagaacagccactggttcggatgttttcttcttaggtgtctacagctcggagggggagattctggtctggagagttatgagtaaatacagaattaatcagttttttcttaactaaatcacctgcctcaacaatcagtcagtgctggggaagttcaggcctcctcgctcaggtccacaccccgcatctctggacatgaaatggcttcgtgtgttttctgatgtgtgggtatcattccaacaggaggataaaggggaggactttgctttctctccccattcacaccctgcaccagccagggcccagtgtgagacacatactccgtagttctctcatgaaggagggagggaatgaatgaaggaatgatctataacctcttcagagacagagacctggatacaagatcctaggaggttctgggcccaacgtgagacacacactctgtagttctcttatgaaggagggagggattgaatgtaggaatgatctataacctcttcagagacagagatgtggatacaagatcctaggaggttctggccacacctgttttctgtccctctagagcctaagacccatgtctcattcatctggcccgtttctcctaaatctgcccctgggagctgagtctcatctgaccctggggctgcagggctgtgggaaggttttcaggggagggatcaggcttgcgggtagtcccacacgtttgccttacaccctggagctctacctggttctcactatgaatatcccataataatcccccctatcctttctggggagtagaaaaaaagtaaatatttaaaaatatgccagagcatctgttcttcttagcaagttcagatagttattagttagcaggaataaatcgttattttaccagagcctcacctgctgggggtttatgggagcctaactgactgaggggggtgggaaatatccaactccagccccctctagccatcatgtcccacctaaaggagagaaaaaactgagaggcacttgtgacattcacagcccagggcacagactctatccaggaccacagaacccctccctccccccactcaccaccgcatcactgaacgcctgctcacccaagttcctgttgcccagtacatcatgtcctggctttcaacaaaaactacaagacagactagaggcaaaaaaaaaaaaaaaaaaaatgcagttcgaaagacagaacaagcatcagaaccagatgcagatgtggcagggatgtggcagggatgttgaaattatcagaccaggaatttaaaacaactctggggccaggagcggtggctcatgcctgtaatcccagcatttgggaggccgaggcaggcagatcacctgaggtcaggagttcgataccagcctggccaacatggcaaaaccccgtctctactaaaaatacaaaaaattaggcaggcatggtggtgggtgcctgtaatcctagatactcggaaggctgaggcaggagaattgcttgaacctgtgaagcggaggttgcggtgagcctagattgtgccactgcactccagcctgggcaacagagcgagattccatctctaaaacaaacaaacaaaaaacaatactggctaatatgctaaaggctgcaatggaaagcatagacaatgtgcagaacagacggatgctgtgagcagagagatggacaggctaagaaagaataacaacagctactatatctatctatctatctatctatctatctatctatctatctatctatctatatatatgtatatatatgctagagatcaaactcactgtaacacctggatctcagagtggttgtgaggatgtttattaggagattaaagagattaaagcagagttatacacagggcgagagctcaactgatgctatcaactagtattcttatttttttgatgttgttattggcaataaaatcaggaacaatgcagtaaaaatttggttttatcatgtacgagttctgtgaccttccttgacttactgaggtactgtaagtctcagattctaactctgcagatggcggtgatgcccctctccctcaaggtgatgtgaggatgagatgagctgtaggtaggttggtgcccactgtgcctggcacatggaaggcccctgaaaatagtcaatgaacatcatccccgctcatcagcatggagttgacagtgagggctcgctctctgtgacaatcatggaatggaaaagaagaaacaagaggaagactgggcgcagtggctcatgcctgtaatcccagcactttgggaggccgaggcgggcagatcatctgaggtcaggagttcaagaccagcctggacaacatggcgaaatttcatctctactaaaaatataaaaattagcctggcatggtggcacaaacctgtaatcccagctacttgggaggctgaggcaagagaatcgcttgaacttgggagatggaggttgcagtgagccgagattgcgtcagtgcactccagtctgggtgacagagcaagactccatccaaaaaaaaaagaaaaagaaaaaagcaacagagggaagaggtgtgacatgagaggaagaagggatttaaaggtacaggagcagggcgaggtgcaagcacctgtgggagaatgtaggagttggtacatcccagtgtgtcaagtctgagacacagaaaatggtgcaaccgtggagagcaagggagtcagctatgaggacagcccaacagaccacactcaggctctggagcatttccttcctccctgactatgcccctgccctgcaatgccccttatggtttcccttggaacaaacttgggccttgtcccctttgccttcccctttctgcagaaaacaacgtcccaggccttcctgtgggggccgtcgctggcatcgtgactggggtcctggttggggtggctctggtggccgccctggtgtgttttctgcttctctccaggactggaaggtaccgcagcttttccccagcctcctcccacccctaggctgaccccagtcagggaggagggagaccccgccctgtattcagggccaggctttccgcatcctcccaaggaatccttccctctcattccatggctcctcccttgccagctgctgatcctaggctgcctcttcctttatgaatgtggcacagttaaggttgcacccctgagtgctgtcctagttccctaacacagcaaagccacagctgcctggagggaggaagggagggagggagggagggagataagacgggagtgctcagaacctggtaccttctgctgttcattgaatttacccacccagtgaggagggatttgcaggcttgagatccatggtgggggtcctgggcatggtcacgcagtggggagtggcaaagcctggacaggctgggtagggtcagcaccccatcgtgattgatgtccctgaggtgtgagatgggagaacctggacctcaggacctgctgtcctttatgtctcttgccaaggggtggagagagagaggacaaggccattgccccatttcagcatctccaggcctgaaaggagggtctggccatggcagggatactgagttctgggagaatatgatacatgctccttgcctccccatgcccccagctcccccagtgtcctgcacacacagccggccctgctttccctctggggccttgacccttcctctcaggcaaacgcaggtggtctgattccctccctgagtcctcagtccctttcctgggtccctgggtcaatgttctcctcacccggcatctgcctgggggggtccttcctctctggccaggacagacgtgactgcttaaggcctatcctcagctccccgtcctcggccgctcctaccacgaaactgatggagacaggaggccttcactccagtccttgaaaatggagtcccttccttgtcctttattctgcccctaaacctgtgatttctccctgcaccctcatgaataatcctgacctttcctagggccagcatccagcgtgacctcagggagcagccgcccccagcctccacccctggtgagtgtcccttcagcccaggtgtgggagcccctaggcctgccctacggtgtccactcctgccagtcaccccctgggggcctctgaccctttctttggggctgcaaggaggatgtcaggaaacatgacacaggggaccccgactgtcttgttcagactgatctgtgggctctgggtcgtgggtcacctcctcgacctcagctgctcaggtctcccctgggaagaggctccctctccctgattctctgggagctgaggacccctacactctcctgcaggaggggcccaggctctcctcccaccctgctgctcactcctgtctctgtccccaggccatggtccctctcacagatccaccttctcggtaagcctgttccctccccagcccttttctactggggtcccaacagtgcaggctcagggcagggggaccatcaaccccacagcacagcactgacccacctttccccagaacagtcaggtcaaagtgagtgcctccagccaggatccgggcctctctacagggccaggaccacccacgccatgtgctgacccctccccgggaccctctacacctgaggagaaccctggagtccagcaggtgcagaatggacactgggaccatcagtcagaggcccacattaacaagggtgcggggtgggcccagccaggacaggggtcagggtgttgtgtccacactgggaggctgagctcaggggcagagctggtcaatcctgaggggaaatgagtggaagtggaggcagggaagtaagtcctggccgatcagagacaggaaccttccaggctgggcttccgtgaccctccctccctgtcccctgacatctcctctctcccctgcccaggcccctctacccagccccagaacagccactcccatctatgaggtgagtgtgggccatggatgttctggtcccgcaggctccaggggacccaggatctgcccccaccagcacctggctgagctcagattcaggaaaatgcagtgaaaatgagaacaggtggtggtgagcagaggagggaggggcctgggaacagggaccccctgagcacagccaggttcagccccagagaagccctgggtgggcccagagcctgggagatgccagacactgttctgagaaggctacaggggttgaggcctcttctctgtttttacaggaattgctatactctgatgcaaacatttactgccagatcgaccacaaagcagatgtggtctcttaggttcctctgggagctgctcttgtgggttgatggagcgtccccaaagctcccagccctggggacggggaaggacatggagcctgagccagagaaccagctctgagtcctgaggagacacaggcctggggacagggagggatgggagtccctgctgaatatctggagaccctgacaggttgccctgggctctgggtgggccgggacaaaggcctctcatcaccacaggaagcgggggcttgcaaggaaagtgaatgggcctgtggcccacccggggtcaccaggaaaggatctgaataaagaggacccttcctctcattggctctttttctgctcacgggaacttagcagaaactcacctgaaactccgtgtccattctctcccgggtcacacagggaaaatatctccaccttgtctcaaccacagtctctcttccctgggaggcagaaataggggttgggagtcaggctggggtgggccctacacaggaaagggcaagattcacatgagccctgcccagccagccgagcgctcagctgtcctcacactaccccagggaccaaggccatgcacagccccagcctgggtccctctgtgaatgcatgtggggtctcaggagcacagaagatggggccatctgatgtccacaaaaggtgagcaatgcgggagcaaccatgggtggtataggttgcggctgtggcccctacgcagcctccagtgtcctgacccctgctgccctcttcacccaggccctggaggcccagtctatcactgtcctccacaaatgaacttacctgtccccaaatccaggatcctgtgtgcttatacctggccactaggttctcctctgtcccagtggctactgctcaggacatctttatccctggtggggcacagagaggggctgtcagagcaaccaagattaatacagacgcataattcagtccttgagcactacccaggactctggcccctcattgctcatcagttcccactttaccccctggcatggatctcactgagcaagccaactctttacacaggagcatccaggtcagaggtgcaggactcccccatctaaagctcatgcaggctcccatggcgatgggacaacctgtctgctcctctccctggcccacagccctatctcgcctgcagctcctccacacacctgggacagcagttctcagcccttccctgagggcccctggaagggtgatgatctcatataggttcacttgaaccaggtgccaccttcccacaagtgagctggtgcctgcactaaagcacagagccacagttcccaagagtgttctgccactgccacaggtcccaagagtgttctgccactgccacaggttgttcgtcctgagatgagaggtaagaaaacaacccgcaatgggttgttttatatcgggatttgcatcaggatttagctctaaatgacccctgatcccacctgcacacagcgtcagatgagacaaggtgaggcctctttagttttctgttgaggctgtgacaaattaccacaagcttagtgacatagaaacctgaaccaaagtgcccacatggctgtgttctttctagaggctccagggaagagtgcatttcctctccttttccacctcctagaggcctcctgcaaccttggctgtgtcctctttctccatcttcaaagccagcagcacagcatcttgaaactattctgtgccctgcttccatccccacatctccacctcctcccacctccctctctcacttaaaaggaaggagccttgtggttattttggacgcacctgggataaaccacaacaacctccccatctcatgatccttcctttaatctgtaaagtgtcctttaccacgtgacatgtccacagatctggggatgaggatgtacacatctttgagaggcccttgttctgtccatcactcctctcaaggccatcttctcatcatcgttcactacaaactacacatgggcacctggatgggttcatcatgactgtggcgtcagttcctgcattaacatccccagcaccctccagatcctgagagagggagacggagggctctccatgcccctagtacctctccaccttcttcttggtgacatgcttagttgctaagaataacagaaagcggaggtgactgaaagatcacaactcaccggcccttcaatagttcgtggacatcagcaccacggacagtgactcagtgaggctaatttccaggtggcagcagggagcatgcagataggagggaactgcaggaaaagctgcccattctattctatatgagaaagagtgtaagaaagaggaagctattacagggataatgctattcttctctaatccataaattgcgaaacctttgcatgtctggatatcatggtttttagcacatctgctgccactccctgcagggctgattgctgcatccaggatgtggtctcttggggggctcacagcctgctttggcctcatggtgagtctccctgcccctgacactcaggccactgtctctgcctacaacatggtgggaaccttccatgattaacgtctgattctctgtgcctgacctttgaagcacatccatcactcagcctggagcatccgctgagctcagcatcctgctcctccatccccagctgagcccttgaggagatgcttgagaggatctcctgggctcctctgtgagctcctccaggctgagccttgtgcttggtgtcagaggcctttgccatctgcttgttctttccataggcaaataatcctcctcagggacaagtggggcctgaagatctgtctgaatatctatctatctatctatctatctatctatctatctatctatctatcatctatctatatgtatgtatatatgagaatgctttattaggcaaaactgcatactatgaacatgctttaaaatgcaacaggatgagatgtgaagacataaagaacaagtgtgtagtgacacatggctatcagaacacactgaagaatccacaccgcggccgagagcagtggctcacgcctgtagtcccagcacttttggaggctgaggcaggcagatcacttgaggacaggtgttcgagaccagcctgaccaacatggtgaaaccccatctctactaaaaatacaaaaaatttagccgggcctggtggctcatgcctgtagtcctggctgttcgggaggctgaggcaggagaattgcctgaacctgggagacacaagttgcagtgagctgagatcgcaccactgcactccagcctgggagatagagtgaggctccatctaaaaacaaaacaaaacaaaaagaatccacactgcttccccgcttcactttacccagaaaaggaatgttctaggccacttcctcttcagcacacatccccagggaactaaaataggttcacagtcacccccatcttcctcattcccatcacctcttacccacagaggcatctctggtcctacagatccagccctgccttcaagaggcacaggtccaacccatccagtgtccctgctagtcacacacagcactcagggtacaatggagggcttctgtgctttggatgggaacaaaccccacctcacattcccacacctgagaagccaccagggtcctctctgtcctgtcctcacactcaatgtctgtcctgggtcacccttgtcatctctcctggaaataggcatggctcctgacaggtaggattgaggctttgtcttttcaggagtccctcccactctgagcacatgaaactgctcagctccatgcaaccctctctcaccaggggccttgttctctgggtccctgaatacctgggtccatgccatgtacattttaagaaaaatgacagtgactctcaccctgacatcctcacccaaggcacgtgtctgacaagaatcaccaggtgagatacctgtggctccacacacctgaggcttcactgcgcaggggtgtcctcatccctctcctcccacccctagggacagtaagcaccacaggctgccttggaccaccagctccccctcccagacacagcctcagatctatactgacatgctacatggagaggctctgatgaacagcaggtattaggaaatcccaccgaaccaggtgccacttgcggccccactcctcctcatatctgtgactgggacagacacacataacacacctctgttcaccgcccagcccccaaggtcaatcacagtctgcttctcccctagatccactgctccccatgtcttccgtcctcagctgcatcctgggtggcctccttgctgttcttgtaccccagaggcaggttccaacctttgtgatgttgcctgcaatgcccaaactttcccttccccttccccttcccttttcccctcccccttcccctccccttcccctccccacccctatcccttcgtcttcccttgtcttcccttcccttccctataaagccaaacatacccatccacctaccttgtggtcaaagtcatcagcctcctgctccactcagtgttctctgaccctgcatatggaggtggtggcccctcctagaacacccaccactcactgtcagccttgcgtggtaatcacagattttgcaggggttacctgtgttcaggtgtgtcacctgtggaaccagaactcttggaaggactggcagagggagctgcttaggatatctcagggctcctggcatctggtctaccacagggctattaacaacagcacttagggacaaggtggaggatggacggttaagagggtaaatatggatgatgtgtgggcaaagaataggacacaggaacacatgcagtactcaaataattatgccaagaaaggtgaggacatggagatggacattcccatatacttctgatgggactgcagtttagtccctacagcaacattgacctcatcatgtttaacgcgcacacgctctgaccactatcctacttctgaaggcctccctgtgctgtgagctctgagaaggccaagcttgcctgttctgtctctgctaaagccagagaccagccaatagcccagcacagggtacttcataaatacatgttgaaggaatgagctccaggaacagtactccacatggtagagatgtgtgtatgaggatgttcactgcagaaggtcatgtcaatgtgacaagtgacgagcagcctcaaatccagcaacaggggtgtgggtaaaagatcatagtgtagccatgcaatggaaccaatgaaaaaaccacaattagagcaaatccacatgtattaataaaggaggtgccctccatacatgctgcacctaacagaatgttgccaaataagaatgaaaaatgatgatatttgggctgtaaaaactagaagtcagctaaataagaatgcatcgaaagtatttgtgaatgcttacaattttataatgccttggcatccgttttggatggaagttggactttctcataccagaagcagggctcagtcacctttgaaatagtttccagttctccacctccttccagttcctcagtgtgattgatcagatatctgatttatacaactgcctcctggtgacctcctccctatgggacttccggatacagcccgtatgactgccccactgaccccacaccctgcctgctgcagtgaccacctctaattacctggatctcatgtctgcttgcattaaatccaccaattaaaactccctgaggacaatctgtttgaataatattctgtaccctaataaaggccttgacccatgggttccccctctgtcctccccatactgcccctgacctctgtgtgtgtgtgtgggtgtgggtgtatgtgtgtgtgtgtgtgtgtgtcctccagacagggcctgtatcccccaggacctgtaagtaataaatctttattttcatcttatgtctctcgcaatcattggcaagagctctgcatcttaaagatcgcaaatttaagaaattggtgtagtcggcacaatagagtacctcttctgtttagcacaagatatctcggagctgctgaggcttttaacatcctcgccggtgtggctgcctcactggtgaggccgttctgttcagtgcaattcagttgctccactgtgtgctgctgtgttgctgctgtagagtgctgccatgttgttctccccaaattgttaccgagtaggaacctgtaatgtgctcccaaggtggtctaccccatgagaagggggattctccatctagggcaagggctaggtgtgtttctggaatcctaatagggaaggcatccacagagggtgaactccactcctccttagagtgaggagtgacatttcccatttattttccccatggaggtgccatgtattgactttttctttcactgtcccaaggttgagccaaggtgagctatggagaccagggcaagataccatttctgttagcaaagcaaatgggtgacaacgtgtggagaagctgtggttctcctgatggatatagcagagtgccatttagtaaaatcttgtcaggaggctgcccctggttagaccggcagtgtctgtagtcactaaggtggatgcgaattttaggccctgggccatggataatccctgcagacacagccgtggcttcatgtgatggggcaatcccgggctagtggctcccttgtttctgcatttcttgctgtggttgcacaatcaacacctcaggggttgattgggtcaccttggaaagagaaacagctgcctaggaggctggtgcacatggaggccaccctcaattttattctgctaacaagttgtaagattaaaacaacagggggctttgggtaccatcaggaacttgtcaagtaaacatccaaagacagaaagaagaaaaagaaaaagacattaaccgtctagaaatacaagccattttaaagattttgcttaaaagatgcgcttgggctgggagcggtggctcacacctgtaatcccagcactttgggaggccaaggtgggtggatcgactgaggtcaggagttcaagaccagcctgaccaacatggtgaaacctcgcctctactaaaaatacaaaaaattagcagggcatggtggcaggtgcctgtaatcccagctacttgggtggagaatcgcttgaacccgggaggcagagacggcagtgagccaagatcgcaccactgtactccagtctgggcgacagagtgagacttcatctcaaaaaaaaaaaaaaaaaaaaaaaaaagacgggcttgtttcgtcgttgtggagtcatcccagagagaggctactccctagagtcactgaccacctttcctcctccatcttttcctcttatcattctagagacagaaaacaagaatctcagctttaggtggctaacctcaccccccaagaaaagaaactaccactttgattgactacaaatccaagaaaaataaaagagaaactttaaaaagtactgagcaaaccacaggtctagcaaacataatgctagccctaggttacttattcatttacaacaaacccctagatataggaggaaaaaataaaaggtaattaaatatatacacatacaatattttaatataaatatataataaatagttaaattatgtatgtataatatgtaactaaatcaaagtaaaatttcatactttgattctattggaaattcaaaattcatttattaacttatatattaaggaatttatgtaaaaaaagatttttaaaagggcaccaatttgcttttgtgtctctacaacataggatctaatttaactttacatttgctaaatacactaattgacaaatattcatggatttaatcaatactggggctcaaattgtagccacacgtgggaatcccataaatttaaacactctgtccctattatcttgagaagaaaactaaatataaaattgaaaaaaacaggtatgtctcaatttacctgtaactttgcctaaatttcccggagtcatatacccattgctgtaaaacattctctattggacataggtgctctgagacaataaataaaatagaagtgtttttggtacttagacattggcttgacaaaatgggatcccatgaaacctcagttaagatagtgaatacggcccaatgtgagttgaaatggggcctttaaggattaaaacttattacatgaaacctagtaagtaatggggtgattatccatactgcttctccatttcatagcccaattttgacagttgtcaaatctggaaaaaacaaacaaacaaacaaaaaaacccctgggaatctgttgcctcacagagacacaaagtagacatcaaaattgtatatctcagttccagttccaaaatggtggcatagaagcaagctggctttactccttcacacagaaaaccaaaaacaaatatacagcaccaaaattattaccagatatattccagaactcaaatatgaaaatgaaacagttttcagagccacagagaagtgaaaaaaactcccgacagatgacaaaagaatcagatttccccatctgtaatgtccctccctgccccattctgcctggtaccaggtgtgtggaaaattttaccccaactcatggtttctacactgggaaatgtaagatcaatgcgggcaaccagtttctgcacaatcctgggttccctgtccctgccttaacccacaagaagcattgtgagtgcccgaagggagaaatttccctgaggacagtcaaagagtggggaggcaggactaccatctccttccctggaaactctgctgtgtaactcagccaagggagacatgaaatcagactggtgtttcagcagctccatgttgtagtaggtttgtttcacaggtatcctgggcatggacatctagccagctttcccacactgccaggatatcccctttgggacctccctcagttaggaagggcacactctgatcatttactagggccaaggtaaaccctaaaggtaacttagagatgaaaaggaggtagtgacctagcagtaaagaactctaagaaaatctatccaataaaaatcaaaacaagccagacaaagactaaaataaataatgaatccttcaatgtaaagacctggacttacatccacaagaaacagtaagcaggtaaccatgatctccccacatggacaaagtgaggaacaagtgactgatcctgatgagatggtgatgtgtgagctctctaatcaagaattcaaaactgcagttttaaggaaactcaatgatcttcaagaaaacatggaaaagcagttcagaaatttatcagagaaatttaacgaagggattgaaataatttaaagaaaacaaacaggaatcttggaattgagaaatatatttgctgaacaggaaaatttattagagtctctcaacagcagaatggatcagaggaaagaatcaacccaaataagactcccccaaggcataaaataatcgaattctcaaaagtcaagggcaaagagaagattttaaaacagaaagagaaaagaagcaaatggcataaagaagctccaattctgtggcaacagattttcagtggaaatcatacagaccaggagggagtgacatgacattctcaaaatgctgaaaaaatattgacatttgagaatactttatccagtgaagttatccttcaatataaaggagagagaaagtttcctagacaaacaaaagctgagataattcacaccatcagactagtcttcctgtaaatactaaagggtaaatactaaatacttcaatgtgaaagtaaaaaaaaaaacactaacatgcaaaacaaccacaacaacaataacaacatttgaaggtataaaatccactggtgaaattaagtacgtagacaaacccagaatactcaaatagtaattgtggaaagtaatccaatcataactctagcatgagtctcaaaatataaatctatcaaaaacaataatacattttaggaggccaaggttggcagattccttgaggtcaagagttcaagaccagcctggtcaaaatggtgaaaccccatctctaccaaaaaatacaaaaatttgcagggtatggtagcacatgcctgtcgtttcagctatttgggaggctgaggcaggagaattgcttgaacccaggaggtggaggttgcagtgagctgagattgcactactgcactccagcctgggtgacagagggagactctgtcttaaaaaaaaatagctacctgtttggagaaaggtaatataaaatatgtaaatagagacaaagtcaaaatttgcaaaggatgaaattaaagagtagagtttttttggggggttttctgtttctattattttatttgtgatctaagataagttgttaccttttcttctcttgaagatactttgttatatctatgtttttggaagtcttatggtaactgcaacgcaaaaaatctatgatagatccactgaaaataaaaaacaatgacttaaaacatactaccagagacaatcaaccacaaggaagacagtaaaaaatgaagaaaggaagaggggagttacaaaacaaccagaaaacaggcaacaaagtggcagtagtaagttcttacttaaaaatattgaacactgaatataaatggactctattctccaattaaaaggcatagagtggctgaatgctgcctatatgctgcctacaagaaaccacttcatgtaaaaagatacaaatagactgaaagtgaagggggtggaaaaagatatttcatgcaagtggaaaccaaaagagagcaggagtagctatactgatatgagataaactacaaatcaaagactataaaaagagacaaagaaagtcactatgtaatgataaagcgctcagttcagcaagaggagatgccaattataaatatctatgcatccaacacttgagctcccaagtctcccaagtatttaaagcaaacaatagtggatctaaaaggagagatagactgaatacaatattaattaggggactttaacaccctgctctcagcaatggccagatctttcagacagaaaatcaacaaggaaacttcaaagttaaactacacactagatcaaataggcctaactggcatttacgggacatttcactaactatctaactgttacagaattcacattattttcatcagcacatagaacattcttcagaacagaccacatcttaagtcccaaaaccagtcagaataaattcaaaaaagtttatatcacatcaagcatttgttctgaccacaatggaataaaactacaataaatgaataactttctggacacatacaacctaccaagatggaagcatgaaaaggcagaaaaacccaacaaaccaacatgaaactgtaacaaaaggaaaacccaggaccgaatgacttcactgctgaattctaccaaacatttaataagaactaaaaccaattctactcaaaatgctttaaaaaattgaagaggatggaacactttcaaactcattctacaaggtcagcattatcctgataccaaaaccagacaaggacaggacaaaaacaaacaaacaaacaaacaaacaaacaaacaaaaaaacactacaggattgcttgaggccaggagtttgagatcagcctgggcaacatagtcagaaccaatctcttaaaaaaaaaaaaaaagaaaaaaattagccaggcatggtggcatgtgcctttagtcctagctactcgggaggctgaggtgagaggaccaattgagcccaggaggttgaggccgcagtgagccatgtttgtgtcactgtactccagcctggggaacagagcaagatgctctctcaaaaacaaaaagcaagctgggtgtggtggctcctgcctgtaatcacagcactttggaaggctgaggtgggagaactgcttaagcccaggagttcaagaccagtctggacaacatagggggactccatctctcaaaaacaaccaaccaaaacaaagccaaaaaagaacataggccaacatcactaacaaacatagatgtaaaagtcctcaataaaatattaacaaaccatgtttagaaacacatcaaaagagatcattcactatgattaagtgagattcatcccagggatgccagtatggctcaacatatgcaaatcaataaatgtgatccatcacattaaagagaaccaagaacaaaaaccatataatcactccagcaagtgcagaaaaggcatttaataaaagaatgggttgagggagtggagcccatagtcagagcagcagtggtctgggattttggaagtagaaagaagggcagcaccactggccaggaccaccagggaacacccccataggccctgggtgttgtgctccagggagggttccctctggagttattaatcttggtgtccactttgcccagctgcccctcacagggtcagggaggatgaagggaaagcttccttctaatgaaagttcagggactcacagttcctagagcctgtagggagaggaagatcttcgaggaagagcacctgggcattggggcgtttgagaggaagatctatgccaggtccaagtggacaacctgtggactctctctccagggacatacgggtatctgggaatctcctgtagcttaaagaggtaaagacctctccctttagcctgaggactggaggatgctggttcaggtgaatgagtcctgcaggggctggtacaggcctggagggtggtggtgtccagggccttgggttcacccttagcatgattcaggccgggcggtgtttcacatgagcaagagggcctgggttcattgcttcaggacaatggtgaaatctcatggtggaagaaatcttgtccttgccagtgcccagctttcatttggtcttggcccagagtgtcctccctagagaagactcttgtcccttcttcacactgcccttcagggatatgccagccttatgggataagatggggtggagactgtagatgtgggtgggaatctctccacagagtgctccttctctcagcggttgcaccttgtctcagggcttcagcttgaaatctgggatctccaagcccttccctccccagtcctggccaggaccacatgggcagatgcattgtgtgaagtgcatttcatttggggtgtcctctctgcatggcaccctcccgttgattctctttgcgcatgtcagagtgcaggcaccatccacacctcctgctggaggagggacggagctgttgactcctgagagctgatcatgtgttcccaccctcacacacaatcatggtccatcctctgagggacatgtgttgccaccactgtggagatggtgcaactgacagtaacaaacagtaaaatctggtactgaatgggaccttaagccaacaatgacaatgtcattccaaggtgtttcatttttattgattcaatgcaagtcacctgatttcattgactattcacaatagctcgataaagtaaatgcatcatcaccaccactttaaagaggaaaaaggtgcttgggcagtttgtgactactgtggtggctgctgcattgctctctggtaaagccaagtaggtggtgggtgcggcctctgggctgggatgatccaccctcctggtggtggcaggggagccaagctggagccatggcctgtgcagtggtagcagctgaactgaccgctgctgcaggatttgcaagctgttacattttgcgaagccatgaagcacataaaacctcaagtagaacaagtgtttcaaagtctaccaaaatctgccttcagagattattactacagaggtggatatgaacccaaaatgacaaaacgggaagcagcattaatactagataatgaatgaacactagtaatagtagggtaagccctactgccaataaagaaaaaaataagagatgctcattaacatgttatgctcttaaatcacgcagacaaaagagggtctccttatatagtagccacaatcaatgaagctaaagatttactgcaagatcaagctaaaaacagtaggtgtataatgaatttttaacttcatattagtttatgtatatgaatatcaagtttttataataaaatgcctccaaacaaagaatatttgatttagggtttaataacttctaagaggggactcagatgtttcctgtttcacagtcagtctgagagggtcatttttcctggagctgacctgggtggaggcctcacactgatactccccagcatcctctctcctgatggggtttatgctgagcatacagtggccctgggacagctccattctctccatgagtcacagacgctggtcatggaagatccactggataaggttccagagtcatctgtggggcaggtcaggatcacaacatccttttcttctgtgactctggtgttgctgactcagatggggtcggagccactgaccctgtggacaatcagtggaggtgctcaactgaaagtgggctgagggcacgtcttctcctccatccctgggtccttaaggtaactgtggaccccagaccaactgacacaggagctagaaagaaattatttaggaagttagtgagggtaagagcgtccttggcaaggtttcccctttaacaaaaagcagcccaagataattccttttctaacaaagagcagcctgaaaaattgagctacagatgtagatgagcaagatggaagcttgcacaggtgaattccagtaggtgtgccaatagaaaagggctgcctggaagccaggtatgttcaacatggagactccatcctcccttttctccattaccacatgtacagtaaaaaaccaggcaacatggcaccggccaggtagacaatccatctgcatgacaaaagatcagagtggggcagccagcaaatggcacagctggtctaaacaatctttcaccccctgtataaatcagacactgcctcctgaagctcatctataaaaccttctgcatttcactatggaagtggcaacccattttccccaggacccctctctctgtgcagagagctcttctctttctttcccctatgaaacttccactcttaacttcactctgggtgcctgcatcctagttttccatggccatgggacaatgaacctcgagtattaccccagatgaatgatgctgtttcacaatcactggttcagctcccttcttcttagggtttcacagctcggtggggagaataccacgcctcagtggtctggggagtgaggaacaaatgaagaattaatcagattttacttagaacgctatcacctgcctcaaccatcagatccatgttgggaatgtccaggcctcctctcttagatctatacccacttcactggacctgaaatcctgtgtttcccgatgtgttggtgtcactcctatgagaggataaaggagagaactttgctttctctccccactcacaccctgcacaagacagggcccaatatgagacacacactcgctcagtagttctctcatgaaggagggagggagtgacctcgagtgattctgccatctgtagtctgtgtaccctggccagtggctgtatcttcatatgcctcagtttcccctcagtaaaataggacacacaatgagaactaaaaataaaattctaattccccagtgaactgaaaggatggcctcttggccaagcggatcccagagttcctgatcatgacaggatgggaggttacacctcattacagcccctccctttggaagtttagaggtgacaactgactagcattaacgctaaaatcgagatcatgagactgacagaacagactctctgtggccataagataccaaattataaactcaacctaaggtcatgcaggcaagggctaagccacactttcctacatttaaagaataagctatgttctaacacagaattttctttctctctagcggctaaagtaacactagccttcgagataagcaatattgaaatgatcgcggctcatccaccaacactggctaactgacccctgttccaacagccacaactacacttcaattggacaggagactgatttcagtaactttctcctaataagagaccactgagcatggcctggttctgctggtatacagacacggtgcactgagtaccataatgcttgtttcatcttttgatgtataagacctaatttaatacatttaaatctgaattctccaccccaaagtgaacatggggtgcatgtagcatgcatgtttgttgatcacgcatgtgcgtgtacttcctttgtgagtatccatagctccacctataacctgttgaatatgtatacctggccaactcattcagcataaatctatcttccacattcccctcccttgaagtgcctgctattggtctctgctggaggctgcatcttctaccctggggaatggccagcctgcaggctgtaaccctgtgtaagaaataacctggttgggtgcagtggctcacacctgtaatcccagtggtttgggaggttgaagtggtagaatagtttgagctcaggagccagagactagcctgggcagcatagcaagatcctgtctcttaaaaaaattttagggaggagagtgaggatcagaaaaaatacctattggctattatgcttagtacttggatcatgaaataatctgtataccaaacccctgattacatatataacaaacctgcatgcgtatctttgaacctaagataaaagtttgttttaaaaactatctgggtgcagtggtgcatgcctatagttccagctactcgagactgaggtgtgaggagtgcttgagctcgggggattgaggctgcagtgaattatggtcccacctgtgagtagccacttcactcaaacctgggagacagagcaagaaccggtctctaaaaaaaaataaaaatagaaaaataaaatgaaaaatatatgaaataaagtctcctttccaaacgtacagatctccgatttttctgccaacaatgataaatggtcagtggcttgccatgttgtctgtgaattacttttaaaatattcacgatcacctgacctaaaggttggtaccaaggaaccgcctgaatacaccgtctctgattatttgcctccaacagagtgttccctgggcctgatctctggtggacaatgagctgctgggaacatcctctcttctctattcctcccctggggatgctgaccttcccttggagtctcctaagttccccagggcagtcggctaatgtcctagggagcttacctgtcttctccataccaagtctcatgtgaaggacgaggctttgcccttgcccagatgaggctctgggggctgagccctggctggctaccagctgcaagagccatggcccttggacagctggtaaatccttgttcccagtcagccctgcccaagatgcctcaacccagccccggcacaggcttcccagggtcacatggagtcaggatcctgggacaggggactggacaggggtttccagggctgagtttctgaacaggggcttcccaggggtcccctcactccaggatctgacatggtcctacaaggaacgtccatggggaggggacccaggagggggaactgacactgacctccccttactgagcctccccccaaccccatcagactgtccttcctctgtagcaagtgcctgcagggtctggatgcaggaaagaaattctgatctgtggaagtttgtctcccctgtgtgtgtcttgcactaaatgtccaaacccccaaatgggatgtaatgtagagggggacacaggcacagcccaggcctgaaaatcctgtgtgtgtgaagcagaactgacccccaacacccagagctcatgagacatcactgtgtacgtgaaactggccagttacttcttcattcacaagatctgtttttatgacttgtagggtgtaggatcctgtgtcattgttggtgacattctgtatcagcagacatgtattggggtatattgtctctcagcctctgtggcaggtcctggggtaattacttgagttcctagtacatatcctgtaattcccctttgtaccagttgtagccaagcctaaggcagattgtgggtgagtggaagaatctccttgccttctgcagcttcaacagtgacttgggcagtggtaggcaagttccagaaagttaaaagtgaggctaggagtggggagagagcatcagttaatactgggccctatgcattgaggtggaaagatggggccctaggtcctggacaggtctcttcatccctcagccttggagtgtgtgtgtgtgtgtgtgtgtgtgtgtgtgtgtgtgtgtgcgcgcgcgcgcgtgcgtgcgtgtcctactgggccaaggtcagcagcatgacctcccttccttcagtgcctctgaccttggcatttccctgtttggagtccttttccccaggggtctgcctggctccctccctactgccttcaggtcctgctcacattagggcatccttgggagaccccttccctgacacctctagagaccctgggtcttccctttctgacctttcgctgctgtgttccctccagggctcttgtcaatacttgacctcacattctagatacccttgcatgtctgtcttcctccctatgagagcatgagctctgtgagaacagggacttgtgtgatcttggttgcaccccagtgcctgggacaggctgcggactcctgtggatgagctcatgagtgttcccagggcccttcacaacgtgggatttattttccaatggctgaggttgttggctaagagctctgttggagttcaatcaggctggtgggaaaaatattagagatagttatagagatagacacaaatcttcttggaagaccaaaaagtttgcataactttggtaatagatctgactgaaggtggtccctttacctttagttaaacaaattaaagtagtaacaaaggaaggcagagtagtttgtctagccagcttgtttactcatgtgatcttaagactaaccattgatgtgccacaggtgcttaattgctttctacttgggaagtccacaatgtcaattaccctctaacggtgttgactcaagcctttgttaattaatcttactgaataaatatgagtctcactagctgatcaaggccatggtcacaactgtttataggactcagcagggagtctgtaagcggccctgacagactcagctggactggcaaagcaaaatatgtgtgtgtcagtgtacactattcacccgtcccccacagctggtgcccctatatgaggagtgctgccacagagctctgtttagtgtcccttgttttttttcttgagtattaccccaacttaaattgtgattattgtcatctgttttcaacattaactgctcagtgatgattcacttggaaaacattaacaatcgagattgtttcttcactaacaacctcagattatttagattttcctgttgtaatcccttcttcctgtttagtgtccaacagaagccctctgtccctctcaggtccccgttctctccaagaaaccccagccagtctctgtgctccctcctcccatccactcccagggagccctcccctcacctgtgagcagaagcgcctgccagggatgtgcactctgtgaggaggggctgagggaggccccatgggctctgctgtctgctttgtcctcctctgtggagaggagcttgggcttcagaaaataaggaggccagaaagtaaggaacaggctgagaaataatggggatgtgtcgaaaggtcacagatgccaacatctttgtcctatgcaatattatccataaaattacaggtttgagatatgcttaaattttcttctaacatgcattaaaataaacatataacttttaatagttatattaaattgtatttaatataaattaaatgctcttgtcagagctactgtgactgtcagctctgctgtccttcctctctctgtgctaagcctcctcccagggcagaagcacttcccagggccaggggtgggggcggggaaaggtaagtggcaatgaggatctgcacaggtagcctttccgcctcctcccctctcagtcctgcctccttgtcttcttttcctctttttctccaatctacatttcagttccttagaccacgctgtgagaagcaaggcttattgggacccccatcccttaacaggatgacctgtgctccccataagtgacctctgctgtgtctagggattggctctgtcagcacctcacagagagtccctggggcccccaaactcagtgttattttctctatgacacagaaacccctctgggtatgcaaggttttcctcatgttttctaatgtctgggaaggttggatttactcccagcagggaggtcacagagatgtccagggagtggggtcctagaaatggacaaatctagagctaaagcccaggtctacgattttcagttgtttttttctgcagtgctatgtgaccctaatttcctaggagtaactaaaatgcaaacctcagacatttgtagacattttatgatttttctctacagcttgtaccactgttattattatttgctttatgctttttcctaaataaatttactttacaaaacatccttgtcctagtagggtgcaggggctcacgtctgtgatctcagctgcttgagaggttgaggtgggtggattgcttgaggacgggaatttgagacaaaacatctttgtcctatgcaatattatccataaaattacaggtttgagatatgcttaaattttcttctaacatgtattaaaataaacatataacttttaatcatcatattaaattgtatttaatataaatttatatacaatacatttttatataataaattatatatataaatgtatatataatagtttttcttttttgagatggagtctggctctgtctcccaggctggagtgcagtggcacgatctcagctcactgcagcctccgccttctgggttcaaacgattctcctacctcagcctcccgagtagctgggattacaggcgcctgccgccacgcccagctaatttttgtacttttttagtagagatggggtttcgccatgttggccaggctggtctcaaacacctgacttcaggtgatatgccgcctcggcctcccaaagtgctgggattacaggcatgagccaccatgcctggcctatatattttatataattatataaagttttctataataaattttatataataatatataaaatggatatttatttaagataaagttattagttttatatatttacatatatttaggaataaatgtgttactgtgggagcccagtgcccaggcaggtagtcagtacatgatggttgtcattagggttaatactttggaattctggattttttcccaagagagtgtctacgctggaatattgggcttgtggctttctgctgatgtgcatgtgtgaagaagctacttccacttattaggacttgtgtatctgtctcgcagtttcactacctattttctcgtgatgttggtcaagtcgcctaacttttctgtgcctcatttacctaatttgtagaatatgggtaacagtacacaagtgtgagtgtgtatttcccaggactgaccactagagggcgtgaaggcaccggcacttactattacagcaatgggtgtagtagtgctcatggtcgtaaacatcattctcccatgaaaggaaccagggcttcctgggagaaataactgattccagggctggggccggaaagcacaagcggagcctggagcatctcgtgaggccagaaagtaaggagccggctgaaaaataatggagatctgtcgaaaggtcacagatgccaaccagaaggagctttgaatgaccaattttgagacaaaatgagcactataagaaataatgatagtaataaattccaacccataaatacccatgagttcctactaatataaataaataattgaatacataaatatataaggatgaagaaacagctttttcttacagcagaattccaattaatgaatgtagaaggaatgatcaaatagaaaatcactatttggctaacagcacagtcaattgtttgtaggcaagaattatcaatggactttaaatatgaatgggtaaaagtatgatgatgctacaactagtgagtaccaagggggaaaaaaaagtacgttgagaagaaacaggctacttccatattcccaaagtatcacttcaggagctacttattgattataatgggacaaatagtaacttacagtagagaaacctggcaacagagtctctccgaggtacaaaggctctcttcaggaaggaggtaaggggaaggaagaagaaaacactgtcctgcctcaattatttgctttccccattctcaagtgtacttcatagacattcaaagatatgtgttgatagtgtccacgatccacatggctctattatagtcatttattcacacatacattcagtgaggctttgagtgcctaatgtgtgcctgatatttgctagatggtggatgctgagaagatcaggtgtgctgctgtctctagggtgactgaatccacctgccccactttacagatgtggaaattaaagtgaaaaggatttataggattagttcactgtcacaaggtcactagccttaaagttacaggagtaaagcaagtttcctgacttgctagattttctgctgcaggtgctgacaatggtgagctccaataggagagaggacactcagagtgaagtgggagccctgaacaccctggattagccaagaggacatgccgggtccagctgtgaccgcacaaaggaccattggggatatttgtattctctttttcacttagagcttgaaatgaggaaaactaagtgcagaaaaccaagagtggaagatttttcacaaagcactggtaacatgcatcagaaaaccctgtgctgatgtctgtcacggtgtttctcactgaacggtaatagtctggctttgagtgtgttccctctacagcctggagttctgcgaggcagggaccaggtgtgattcatctttgtctctccagtgacagtacacagcaggctctgataaatatttcttacaaaataaaatggaataaaaagtagacatctgcacaggtgtgggatgactgagcagcagcagaagcaggaaaagtcagcgtccccagatcagctgatgtggtgttcggattctagataggggtgaggtgccaggatggggatgggggtcctgtggctctgctgccctgggggacacccctaggtttcacagtgcctgctgtggttgctgcactttgcttccccatgggaaagtgatcagagggtgtggggcttcaggtgaccccatgtgggaaatggccaagggaaggtggggtgggcggcacatggttttttttaaccaatatttgaaggtaggttgtatgaaaaggtgttaggcttatttcagcttatggggagtaggacagggattggtgagtgtgtatcaggtatattttggctcaggatggaaaagaactgtcacagtaacataaggtcttttgggaaattacatgtttactggcagagttcaggccagggctgggtgtctgaaaatacctgtcagggtcacttttatggttacaagggcagagcttggcttggaaccaggtttcttactaataccacatattaagtattataaaaactgtcctttgcaataggacattgctctatgatgcaggttgaggtccctctgtttaagtaattgtgggtggctgtgattctctcatctagtctgcgacttggacttcacctccatctgcagtccctctcctttgctgttgacactggtcagagttaagcgcatttactgacgatggtcacagggtggcagcactgcctctctggtattttctaaaacctcttcctggaactgagccagtctaagaggatgtcatgactaagaaaagggcactaatgaggtgaacagataattttttttttcttgtttctcctgtgaagtaacagagtggaggtgagcatggaataattgccttttagaaatggaagacaatggagagaagtgtttcgcaaaccttaatgtgttcacagatcccacacagatctttttattcaatacagattctgatttttctggtgaggcctgagattgtgcatgtctaaggagcttttggatgatgccattgctgctggttggcggaccacactttgagtagcaaggctcgaagatcatttagaggttaattctcactgcatctaatttatggatgaaaacaaaccaaggtccagagagagcatatacagcttgcctaacaaagccattccctaagtgcctgacttcttgcatttaaacccagggcttcagcctttgtccagttctcactccacacatcacacggtttgttcactgttgtgaacgacagttgtggcagcatctctttagtttaggaatccagagccccaatttcactaccctctttggtcttggctcatgctgtgacttcgaatagttttgcccttacttaaaatcttcagtggctcttttgtaatcacaagatcaagttcgaatatctctgtctagtgttcatggctttataacatatggtatctctttagtaaccttacctaacttccctgttttaaaattgtctcttgctgccatagccctccttgctccttcctgctccctaacaaactgtgttcacttctctctcagtggtagtgatgatggcatggcctctgatgttagactcatgtaacttctaatcccagatccaccaccaacattggcaagttgattcatctttctgaggataagcatcctcctctgaaataaacttagatggcggttgagaggggtaaataaaataacacacaaacccactctcatccctgagaccctcttcaaaactagcatataaaaatagctatttgaagaggttcagtgaaattcaaggtaacacagagaaggaattcagaatcctatcagataaatttaatagactgaaataatttttaaaaatcaggcagaaattctgtagctgaaaaattcaattgacaaaccgaagaatgcactaaatctttcaacagcagaattgatcaagcagaagaaagaatttgtgagcttgaagagataatatatgaaaactcagagtcagagagacaaaagaaaaaagaattaaaagaataatgcatgcctacaaggtttgattattaagctactcaaagagatacaagagaagggtgaaaaccaacataaagaaatgtaaaaaacaatcagaatataaatgaaaaattttctaaaatgctagctagtttttttttgagacaggctcttactctcatcacccatgctggagtgaagtggcacagtcatggctcactgcaggctcaacttcctgggctcagatgattctcccacattagccttccaagtagctaggactaaaggcgtgtgccaccaggccaggctaattttttgtatttttagtagagatggggttttgccatcttacccagggctggtcttgaactcctgggctcaagtgatccaggagattcactgccaaaaaggatataaccaagtcatatagtcataggttatctaaagtcaatgtgaaggcaagaattctaagagcagtgagacaaaagcatcaattaacttataaaggaaaacctatcagtctaacaccagatttctcatcagaaaccttacaaaccagaaggtattggggtcctaatcttttggcttcttaaacagaatagctctcagccaagaatcttgtgtagagtgaaattatatttcaaaatgaaagagagaaatacagtctttttcaggcaagcaaatgcttcaggatttgtcacggctagaccatcctacatggaatgttaaagggacttctaaatcacaaaacaaaagatttaaatagaacagaatagaacctcttgaaaccaaaaaattcaaatggcctataaaacaataacacaataagaaaacaaagtagataacgatcaacatgatgactggaacaaatattaacattgaatgtaaatgacctaacactccacttaaaagacacagattggcaagataaataaaaaatcacaaaccaaatatcagctgtcttcaagagactcacttaacatgtaaggattcttatagactcaaggtaaagagatgataaaagatattccatgcaaatggaaaccataagtgagaaggaatagctatccttatatcatataaaacagactttaagcaacaacagtaagaaaaagacaaataaggcaactatataatgataaaaggatcaatcaaacaagaagatattacaatcctaaatatatatgcacctaactttggagctcccacattcataaaacggttatgatgagacctaagaaaaaagatcaacacaaaacagtgagggtgtcctgggttttctttttattggacagcagtgtactagcctatcactttcccagtcaggggatttttggtctccccattcccctaccatgggttcatgccaaagtccatattttttattagtgtttggaattggattttttttttttgaggtggagtctcgctctgttgcctaggctggagtgtagtggcacgatctcggctcactaacctctgcctcctgggttcaagcaattcttctgcctcagcctcctgagtacctgggactacaggtgcatgccaccacacccagctaatttttgtatttttagtagaaacgagatttcaccatattgtccaggcttgtatagaactcctgacctcatgtgacagggaaacaggcactcagtgaacttcatgcgattgaggagttaatgataatgagagaagggctgtgaggggacagcactggggacaccagagcctgtgacgggctgagttgctgtgccttgggagatgcccttttgactgagccctgggaaggagggggtgtgggggcaggagctgcctgcagagggagtggcctcaggtgggcggccacctggctgcagggaagaggtgacagagttcgtgtgcagagcttggagggtgaggaggaggtgggttgaggtgaccttggtgagggtgaaccatggggggctgtgggccctgctgagggaggccagccagccctggacctacagggtggtttggtcttttttgtcccattcccagcatccactgagtggtgaaactctgcaggccagggaccatcccactggccagaaggagcgcacagtaggtgcccactcagtgcatgttgggctggacagaacctcactctgccccctgcccccagctttgggagctgcagcaaggtccctccccctagggatctccatgcctctgtctctgaggggtgagatggggagacttcaaagggccatctcagagtgtgggggatagagacgcagaagtgtgggggatagagggaggcctgggctctagacccaaaggaccttacacacctcctgagtcttttcaaatggtttcttctgttactttaaaaatgatgtaagtcatcatatttattgtaaatcccaggaatctaatcatgcgtaaaataaggtgtcttatccttgaccccaccccttccccaattaaatttccaggatgttaccactgtttgcagttggtgtgaatctctctttaataatactctgtttatctcacttgtcgttttacgccaaaatacccattgaattatattattgctgaagaccattcttttttttttttttttttttgagatggattcttgctctgttgcccaggctggagtgcaatggtgtgatctcggctcactgcaacctctgcctcctgggttcaagtgattctcctgcctcagcctcctgagtttctgggattacaggtgcacaccaccacacctggctaatttttgtatttttagtaaagacagggtttcaccatgttggtcaggctggtctcgaactcctgacctcatgatccaccctccttggcctcccaaaatgctgggattacaggcatgagccaccacacctgcccagaccattctgttctactgaatcatgtgtggtgggcacctcttatatcaatacatatggattttatcttgtgtttgttattggctcccctttttctcattgcatggctacactcaatgctttgtccacacccctgttcctgggttggaatcttgtgacagaaaatgaagtaacaaaggctaaagctttctaaagtggagtcaggagattgcaagacaattgcactttcaccagcaagagctcaaaccacagaatgttccaatagatttggataaacagctgaagtcagtattcaccagccttcaacatctcaactaggagaaccctaaaattaactaagcacatagaatggaatggacttgtgatttaggattccttctcagccaatgagctgcttctgaaaacaactttttgtggaaattacctgtaaagaaaaccctctcctgtgcttgtcttacagaacactagtcagggctgccctgattcagtggacccgaattgctattatttgtttcctaaacatatggtattttctgtgaccttcatctcaatcttttttttaagttactgggctgtttcccagttttcataatgacgagacattctgcagtgtttcatacacatgtcttttccccatgtggagtattgatccaggagctcattcagtcaacgcatgtttatgaagcatcctgtgccaggctgtgggctggtcactgtcttcagcagagagaggacaggcacagtcttgccttcacagagctcacagctcagggaggctcttagaagtgggatactggtcggagcatgtgcacattaaacatgatgaggtcaaggttgctatagggactaaaccacagtcccaccaagatcgcattgagttcctgtggtagaccagaggtcagggcccctaagatgtcctgagcagctccctctgctcagaagttttggttccacaggtgacacacctgagcacaggtgacccctgcagaacctgtgattaccacccaaagccaagagtgagtggtgggtgttctaggaggaaccgtcacctccatgggcagggttggggaagactgaggggagcaggtggctgatgactttggccagaaggtagggggatgggcaggtgtgcgctcatagggaagggaagagaagggagggcattgcaggcaacaacacaaaggttggaacctgccttcatggactgagaaaagcagggagtccacccaggctgcagctggggagggaagacatggggagcagtgggtctaggggagaagcagactgcgattgaccttggggactgggcagtgagcagaggtgtgttatgtgtgtctgtccccatcatagatatgaggaggggtgaggccgcgggtggcacctgggtcggtgggatttcatagtgcctgctgttccctagagcctctctgtatagagggtcagaatagatctgaggctgtggtctgggggaaggggctggtggtgcttaccatctctaggggtgggaggagagggatgaggatgcccctgagcagtgaagcctcaaggtgtgtggagccacagttgtctctcattagacatgtgttttgcgtgaggatgccagggcctggtggttattactgttgtcaagtttgcatgacaaggacccaggtatccagggatccagagcacagggcccctggtgaggggatgaggctcagatggggctgaccaggttcatgtggtcagagtgggagggactgatggagagacagagcctcaacccctcctgtcaggagctgtggctatgtccaggagagatgacaaggatgacccaggacattgagtgagtcattgagacattgaaggtgaggacagggcagagaggaccctggtgactgctgaaatgtaggatgtgaggagggctctgacccatgcaagttacaggacctccccacccccgagcccacagatgacccttaaattgggcatcctgagtgctgtgtgtgcccagcagggacactggataggctggacctgagtctctgtaagggcagcgctggtctgtaggaccagagtcttctctgtgggtgtgacgtgggcaggaattagcaagatgggggtgacaaggcttggcttggaggatctggtacagaagcccatgggcttggtcagctcagcttctcaggggctcagctggggctggaggagcaggatgctgtgctcagggcatgctccaggcagcgtgatgtgtgtggttccagggtcaggcacgggggtcaaaaattaaccatgaaaagttcccaccttctgtaggcagagaaaatggcctgattgtcagggtcagggagacttaccatgtggccaaagcaggctctcagcctcccagagaccacaccctgggtgcagcactcagctctgcagggtatggcaatagatgtgccaagaaccccaacatccagatgcatgcaaaaattttgcgatatataaaatagagcagatcaagtttccctgcaataacgttgttcctggttgtgtctttttcttgtaaactagacatggacatctttccagcagtctgttctcatctgccaccttcctgctgcagcacctcagaatgaacattcctgagacactgtccgtggtgctgacgaccaagagctatggaacagagtgtgatgtagaatcttctagttacctctgctctcctttcacttttaacaacagagcatcattaacaatgagaaggtggagaggtgttcaggatcttgaagtgacttctgtcttgctctcccataaccctgaagctgctgtagacattattgcagaaactgacaccacagtcaggatggccttgtccaggagcccatgtgcagtttgtagtgagcaaggatgagaaaatggtcttgaaaggggtgatggacagaacaggggcttttcaaaaatgtcacatcatcacccccagcatccgtgaatctgtcacatggtaagagaccttacagattaaatgaaggattatgagtttggaagattattgtagtttatccagatgggtccaacataatcacagaatcccttccttacaaatgagagagggaggtgggagagtcagagaaggaggaggagatgtggggatagatgcagaagacagagcggtgtcaagatgctgcactgctggctttgaagatggagaaagaggacacagccaaggatgcaggaggcctctaggaggtggaaaaggagaggaaacgcactctgccctggagcctccagaaagaacgcagccatgtgggcaccttggttcaagtttctgtgtcacttagcttgtgggaatttgtcacagcctcaacaggaacctacagaggagtcaccttgtgtgcaggtgggatccagggtcatttacagctaaatcctgatgtaaatattgcaggttgcttttcctacttcctatctcatggccaacaaccctggacaatggcagaacacccttggaaaccacggctctgtgctttagtggagggaccagcttgtttgtgggaaggtagcacctggtccaagtgaacctacatgagatcgttactctccccagggccctcagggaagggctgagaacagctggcccaggtgtgtggaggagctgcaggtgaggcagggctggaggggcctgtgggtccaggtagaggggcagacaggttgtcccatcgccatgggagcctgcacgagctttaggttggggaaccctgctcctctgacctggacgctcctgtgtggagaggaggcttgctcagtgagatccacgccagggggtaaattgggaactgatgggaaatgaggggctagagtcctgggtagtgcctgggaggaccttgctcaaggactgaattcttggtctgttcccaccttggttactctgacaacccctctctgtgtcccacggggataaagatctcctgagcagtggccattgggacagaggagaacctggtggccagagctaagcatccaggatcctggatttggggacaggcaagctcattgctgggggacagtgatagatacggcctccagggcctgggtgaagagagcaggagggctcaggacactggaggctgtgtggaggtcacacccacgatctgtaccacccatggatgctcctgcattgctcacctttgtgtggacatcagatggccccaacttttgcactcctgagacatctcatgcattcacagagggacccaggctggggctgtgcatggccttggtctctagggtagtgtgaggacagctgagcactcagctggctgggcaggactcctgcgaatcctgccctttcctgtgtagggtccaccccagcctgactcctaaccccctactcctgtctttccagggaagagagactggggttgagataaggtggagatatttttcctgtgtgacccaggagagaatggacatggagtttcaggtgagtttctgctaagttcccatgagcagaaaaagagccaatgagaggaagtttcccctttattcagatcctttccaggtgaccccgggtgggccataggcccattcactttccctgcaagcccccgcttcctgtggtgatgggaagccttcgccttggcccacccagagcccggggcagtctgttgaggtctctatatattcagcagggacccccatcccttcctgtccccaggcctgtgtctcctcaggactcagagctggttctctggctcaggctccatgtccttccccatccccagggctgggggcttcagggacgctccatcaacccacaggagcagctcccagaggaacctaagaagccacatctgctttgtggtcgatccagcagtaaatgtttgtgtcagagtgtagcaattccagtaaaaacagagaagaggtcttgacccctgaggccttctcagaacagggtctggcatctctctctgggcccacccagggctactctgggactgaacctggctgtgctcagggggttcctgctcccaggcccctccctcctctgctcaccacctcctgttattttcactgcagtttcctgaacttcagctcagccagatgccagtggggacagatcctgggtctccctggggcccaagggaccagaatatctgtggcccccactcacctcatagatgagagcagctgccctggtgctgggtaggggaatctgggcaggggagagaggggtgtcaggggacagggaaggattcctgctgtgtaggaattccagggctctcctcaggtgatggagggtcccagggtggggttagcacagggagtggatgatcctggccctgaacagaggcccagctcatggccagggcaggtctaaccttatccaagtcattctgggtagggtgggtttgtgctggggattgacagtccccctgccctgagcctgcacagctggggccccagtggaaatgggattgggaacggacagtcttacctaggagatggagctgtcagagggtccatggcctggggacagagacaaaagtgagcacgagagtgttaggatagctgggcccctcctgcaagagtgtgtgggggtcctcagttcttagagaattggggagagggagcctttctcaggttattttaggggtcaagtaagcaagtgaggttgaggaagtgacccatgacccagagcccggaggttagggctgacccggccagttggggtttcctgtgtgatgttttatgggatcctctttgcagccccagggatagggtcagaggcccctgggtgtaactggcaggagtggacaacttggggctggcttagtagttcccagccacacccagactgaagggacactcaccgggggtggaggctgggggctgctgctccctgaagtcactctgatcgctggccctaggaaaggtcagggttatttgtgaaggtgcaaggttaaaagtcacaaattggagttaaaataggggaccaggaaaggagcctatttccaagaggggtatggagacctcctttctttatggagttctgtggtaggaggggcccaggtgaggggagttgaggaaaggccttacaaagccacatctgtcctggccagaggggaaggactctcaggcagatgctgggccaggagaacattgatccagtgacacaggaaagggactgaggacccagggaaggaatcagaccaccaggggttgcctgagaggaagggtcaaggcaccagggggaaagcagggccaggcacatgtgcaggacactgaggggactgcatgcatcttggattctcctggaactcagtgtccctgctgtgaccagacactccactcagggctggagatgctgaaatgggacaatgatcttgtcttctgtctctgccctttggcaagagacataaacgacattccaggatatgccatattggggccccggttctcccttctcacagctcagtgtctgcagttaccatgtcagtcaaaggggtgctgaccccacccagcccgtccaggctgttccagtctccactatgtgataatgcccaggatcccccctcagatgccctctcactgggtggatggattcagtgaacagggggaggtaccaggtattgagcaccgctcccccctgctccaggcagctgtggctttgctgtgctaggaaactaggaccatgctcaggggcatggccttaattggactgaattcactgaggacaaagctgttgaggaagcagcccagggtcagcagctggtgaggaaggtgccatggaatgagagggaaggatccctggggagtcgggaggctggggagagcctggcactgaatacaagacagggtctccttccttctcgcctggggtcagcgtgaaggatgggagcagaatggggaaaagctgtggtacctgccagtttttcggaggagcaggaaacacacaagtgcagccaccagaagactcccaaccaggaccccgatcaggatgcctagagtgttgtcatctgctgaaagaagaaggcaaaggggatgaggtccaaatctgttccagggggaaccatgaggggccttgcagggcaggggcatggtcagggaggaaggaaatgccatggagcctgagtgtggtctgttgtgctgtcctcatagctggctcccttgctctccgtggttgcaccattttctgtgtcttaggcttgaattactgggatgcatcaactcctacattctcccacaggaagcctgcacctcatcctgctcctgtgttttttagtccctccttcctctcacatcactcctcttccccctgtttctttttttccatcccatggcagtcgtaaagggcaggcccttgctgccaactcaatgctgatgagcagggatgatgttcattgactgttttcaggggccttccacatggaaggcacagtgggaatcaatctacctgcagcttttctcaccctcccattgccttgagggagaagggtatgtgatattgtgaaatacgtatttggtgttcatcaccattgatatggttaggctctgtatccccacccaaatctcaccttgaattgtaataatccccatgtgttatgggagggaccttgtgggaggtaattgaatcatgagggtgggttttttccatcctgttcttgtgatagtgaataagtctcaggagatcagatggtttcataaagggaagcttccctacacatgtcctcttgcctgctgccatgtaagacatgcctttcaccttccatcatgattgtgagacctctccagccatgtggaattgtgaatcaattaaacctctttcttcatacattaccaagtctcaggtatgtcttcattagcagtgtgagaatggactaatacagtaaattggtaccagctagtggagtgctgctataaagatacctgaaaatgtggaagtgactttggaactgggtaacaggcagaggttggaacagtttggagggctcagaagaagacacaggaaaaaagtttgaaacttcctagagacttgttgaatggttttgattaaaacgctgatagtgatatggacaataaagtccaagctgaggtggtctcagacagagatgaggaacttcttgggaactggaacaaaggtgactcttgttatactctagaaaagagattggtggtattttgcccctgccctagagatctgcagaactttgaacttgagggaaatgatttagggcaactggtggaaaaaaaattctaagcagcaaagtgttcaagatgtgacttgggtactgttaaaaacactcagttttatgtatttacaaaggtatggtttggaattggaacttatgtttaaaagggaagcagagcataaaagtttggaaaatttgcagcctgatgatgcaatagaaaagaaaaatccattttctgaggagaaattcaagccagctgcagaaatgtgcataaacaatgaagagcaaaatgttaatccccaagacaatggcaaaaatgtctccagggcatgtcagagaccttcctggaagccccttccatcacaggactggaggcctaggaggaaaaaatgtttcctgggccaggcccagggctcccctgctgtgtgcggcctagagacttggtgccctgcatcccagccactccagccatggctaaagagggccaaggtacagctggggccatggcttcagagggtgcaagccccaaaccttggcagcttccatgtggtgttgagcctgcaggtgcacagaagtcaaggattgaggtttgggaaccttcgcctagatttcagaggatgtatgaaaatgcttggatgtccaggtgaaagtttgctgcagaagcagagccctcatggagaacctctgctagggaagtgttgaagggaaatgtggggttggaaccccgacacagagtccctactggggcactgcctaatggagctgtgagaagaagaccacaatcctccagaccccagaatggtagatccactaacagcttgcaccatgcacctagaaaagctgcagacactcaacgccagcctatgaaagcagccaggagtggggctgtaccctgcaaagccacaggggtggagcccaaggctatgggagttcagctcttgcatcagtgtgacctggatgtgagacatggatacaaaggagatcatttcagagcattaagatttggctgccctgctggattttgggcttgcatggggcctgtagcccctttgttttggccagtttctcccatttggaatgggtgtatttacccagtgcctgtacacccattatatctaggaagtaactaagcttgcttttgattttacaggcttataggtggaagggacttgccttgtctcagatgaaactttggacttggacttttgggttaatgctggaatgagttaagactttggggaactgttggaaggcatgattagttttgaaatgtgaggacatgagatttgggaggggtcgggtggaatgacatggtttggctcttcttcacccaaatatcaccttgaattttaataatccccacgtgttgggggaaggacccagtgggaggtaactgaatcatgggggtggattcttcccatgctgttctcatgatagtgaataagtctcacaagatctgatggttttagaaaggggagttcctctacacatgccctcttgcctgccgccatgtaagacatgccttttgccttctgccatgatttcaaggcctccccagctatgtggaactgtaagtcaattaaacctcatttttaaaaaaattacccagtctcaggtatgtctttatcagcagccaagaccagctcggtcgcggagatcctaacccagcagtgctagaggaattaaagacacacatagaaatatagaggtgtgaagtgggaaatcagggttctcacaggcttcagagctgagagccccaaacagagatttacccacatatttaataacagcaaaccagtcattagcattgtttctatagatattaaattaactaaaagtatcccttatgggaaaccaagggatgggccgaattaaaggaataggttgggctagttaactgcaacaggaacacgcccttaagatgcagattgctcatgctattgtttgtggcttaagaacgcctttaagcggttttccaccctgggtgggacaggtattccttgccctcattcctgtaaacccataaccttccagcttgggcattagggccattatgaacatgttacagtgctgcagagattttgtttatgaccagttttggggccagtttatggccagattttggggggcttgctcccaacagactaatacacccattttctggtatgtgactctaaagtccttagaatcttcaaagtgatgtctttttcaagctaataattgactgatgactggcagcccctaggcaacttcagaatgaggctggtcactgacccaggtaggattagagggttgggactttcagcctcacccctaatccctggggagggacctggagtttgaattaatcaccaatgaccaatgaatcaattaatggccaatgattgaatcaattaatggccaatgattaaatcaatcatatctatgtcatgaaccccaaaaggactgggtttgaagagctgaacccatggaagtttctggagtgtggtgcatctggggagggcatggaagctccacaccccttcccacatgccatgctctgtgcatctcttcatctgcatcctttgtaaagtcctttattacaaaccggtaagcctaagtatgtgtttccctgagtcctgagagctgtttgagcaaactaatccaacccaaacagggagtcatggaaacctcaatgtgaagccagtcataagaagctctggaggcccagacttgtgactggtgggaaggtggtggcaattttgtgggactgagccctctgctgatatgtccaggtagatagtgtcaggatggaattggaggacacctagctgatgtacggtgcagaactgattggctgctgggtgtgtgggagaaacccccccgcatcacatttggtcacagaagtgtgtctgtgttgatgattgttattgtggagtgagagcagaggaaaaacacagtttgagtttttccaaacagggtggaatcccatctgccaatttagaatctgaaacttatagtttcagtacttcaattaagattgaagtacttcaattcagtacttcaattaagattcagtacttcaattaagattcagtacttcaattaagattacagaactggtaagtgaaagtgatacaacaaaaatgtaaccaaagtctgctcaacttaacagctaataacaacaaagttcataaaaataataccagtcgatattgatagcactgattgagccctggctctgtgcatgaccttgttaagggctttaatcgcattaatctctgaataaatatcctcacaaccaccctgagatccaggtgtttgtaacaattctacagatgaggaaactgaggcccaggaggttgagtgtcttgcccaaggtcaaatacctggtacctattgtaaccaggatgataactggatgagtctaatccctgagttcttacccacattgctccccaggctctgaaggaatctcatccttctcattccgtgtatcattttacaccccccctccctcctaggaaaatatacaaggaaaggagtgagaggggccgagggtcactcacattttacagtcagcttgagggggtcgctcctgttggagctgactgggttggagacctcacactgatactccccagcgtcctcctgcctgatggggtctatggtgagcatatggttaaaccaggacagcttcatcctcttcgtgacctgcagacgctggttgttgaaaatccactggaaagaggttccagtgttatttgtgtggcaggtcaggaccacggagcccttctctgtgactgtggtgctgctggcttggatggagggctgagccactgactctgtggatagagtgaccaacagaaagtgtcttggggccatgctgcatcctcagagatctcagagtcaaatttagaacattctcctgtgaataaaggagaaagatgaaggacagggaggagcagagagaaccagagacacccatagcagcgagcagtagggactacagtgacctcagagaccccagggaccaggaggacccagctgcctcagaccaggaccagggagccctgaaaaccctcccacagatgagcggccccagagtcacatgagatgcaatacctggggtggctttaggagcaggcagtcagagaaatggaacatgggtctcagcccctaagggacaaggaagaggtgtggccagctcctcctaggatcctacatccaggacccagtctgtaaagaggttatgattattcctttcttttttcattaattccctccctccttcatcagagaactactgagtgtgtgtctcagttgggccttgtgcaggtacagggtgtagtgggaagagaaagctgagtcctttccttcatcctcccatgggagtgacatcaacaaatcaagaaattcatgatttcacgtccagtgagggaagaaatgtggatctgatgggagaggcttggacaatcctggcattgagtctgatagttgagacaggtgatttcgttctaagtaaaaactgactaattctccatttgcccgtcattcctcagaccagaatctccctctctgagctgaggatgcccaagaagaaaggagctgaaccaacatctggtcctggggtccacagatgccccacggtggtggccacgaccagattctgggctgcagacacacggtggtgtgacgttgagcactgacagcctgtgtgatgctgatgcaatttctctttaataaaatggggtaaatgtcaatggtccctggcttgccatcctctctgtaaattaacattaaaatatttacaattacctgacctaaagcttggcacagaatagctccaaataaacatcatctattattattttactccaaaaaaaaaaaaaaaagagttctctgggcctgattcctggtggagaaggagcggtccagagtgtcttttctctgctttccctcctcctgaggacagtgcacttcccgggacatcttttaagtttcccatccagtttaatggcctgggaagtttgtttgtctgtcctctccactctgactctcaggtgaaagatgaggctctgcccttgcccagatggggctctgggggctgagccctgcctggtgaccagctctaggaaccacggccctgggacagctggtaaatcgttgctcacaatcagccctgcccaggaagccacaacccagccctggcacaggctccccagggtcatctggagtcaggatcttgggacaggggcctggggcaggggcttgaagggctgagcttctctcagaggatcctcaggccaggccctgactgagtcctataagatctttctcaggtcatgtctatgaggaggaggccaagcggggttggactgagactgattttcccccgctgcatctcccgcatcagactatccttcttgctgtagggaatttccacggagtccggataagggaaaggaattctgatctgttatagtttgtctcccctgggtgtgtcctgcactaaatgcccaaaccccaacatgggacgtaatgcagagggggatgcaggcacagcccaggcctgacaatcctgcgtatgtgaagcagaactgacccccaacacccagaggcacggaggaatcactcaccgtatacacggagatggtgagatgcctgttcaatctgagaatttctgtatgtgacttgtagggtgtagtatcccgtgtcctctagggtgacgttctggaaatgcagatctccactgggtgatattgtctctcgaccgctgtatgcaggccctggagtcctaacgtgagtgtctattacatatgctgcgattagctggttgggctccaccgttttccctttgtaccagccatagctgtaaagattctcgggcagataaaccacagagagatgaacattctccccttcagcaacttcaaagggcgctgatgcaataaagagccaggcagtggtgggtgcgttccagaaagttaaaagtgaggctaggaaagggagagaatatcagtcaatatttgacctatgcattggcatggaaagacggggtcctgggtgcaggtctcttcacccctcagccttagagggtgtgtgtgtgtgtgtgtgtcctactgggtcaaagtcagcagcatgaccctcattccttcagtacctctgaccttggcatttccttgtgtgaaccctctttcccaggggtctgcatggttccctccccactgccttcagttcctactcacacaagggaatccctgggagacttctttcgtgaagcctcctctagagaccctgggtcttccctttctgacctttcccagctctgttccctccagggctcttgtcagcacctgacctcacattctagatctctttgggtgtctgtcttcccccccatgagattgtgagctctgtgagggcatggacttgagtgatgttagttgcaccccagtgcctgggacaggctgcagactcctgtggatgagttcatgagcgttcccagggccttccatatcctggggtttatttgctaatgtctgaggttggcagatgaagacagagtttcatgccctggtggtgtttttatttaaattgtcactgtgatatagttttactatcattttcaaaatgtagtggccactgacaatgaacttgaaaacatggaccaactgagattgttttgccccttggcaattccagttcacttagattttttggttctccttagacgctctctcccctgagtctctaacaaaagccctctgtctcctctcagagccccatcctccccaggagaccccagccagtctctgtgctccctcctcccacccactcccagggagtcctcccctcacctgtgagcaagagcccctgccaggggatgcattctctgtggggacaagctgaggggggccccatggtctctgctgcctgctctgtcctcctctgtggagaggagcttgggctccaggaacgctctagacagggttactgtgactgttgtctctgctgtccttccttcctctatgctgagcttcctctcaggcaggagcacttcccgtttatgggcaagggcggggctctgcctacaatgtctctctgtcccctcccctctcagtcctgcctcccttgtccctcctttctccttcctttttgcctatatttggttccctaggcaaaactttgagaagcaacgctgatggggtcctcataacaggacgacccactctccccagtactgacctctgctgtgttctggccttggttctgtcacagccggtagattatttccctttgtgacacacaaaaccagctgggccctgggtctcctcatgctctccagtgctccaggaaggcagaatgatgcccagcaggaaagtgacagaggtggctctgggggctagaaaggggctcactgggtgatggctgggaaggacccacccgctatcttcagtgtcaccagcctggcctctgacccagggacagagacccaggcctggaggtctcgggaggatccccagctcctaggtgtggagggaggtgtcctgtgtgtcctgggaagagaggactttgatggaaggaggtgggaggctctgggttctgctgtccttggtgaaggtttcagggggaccctctccatgtctggggtctgtgcccccagcttaactctcattctctttgcaaatacatatattttgtggatctgcagttgcctgaactgtctcatgtccctaaatctttgtatccctttttacagaaggtcaggaagggtgtgtacatgagtatgaggactatctgatcagggcgagtgtttgtttcccaaagatctctttagatatggtataatacataagataaatgtactgaattagcaattttaagtgtagaattaaatgatactaattctattcacaatgttgtacaaccatcaccataattttttaccagaaaatcttcattataccaaatggaaacttcatacttttaatcaataactccccacttccccctgccccacccactggtagcctctgatactatcaatctctgtgaatttgcctagtttacatgtctcatataataaggaattatatacgtgtattatttttttctggattatttctcttagggtaacacttttaagattcatccacgtcgtagcatatattacagcttctttcctatttatggctgagtaatatcccaatatatgtttatacctcaattttaattcattcatctcttaatggacatgtgggtggtttccacatttttgctattgtgaaaaccgctgcaatgaacttacacttggaagtatctgtttgggtttctgtgttcatttctttgggggtacatataggagtataaatatggggtcatgtggtagttctatgtttaagtttttgagaaacagccaaactgttttccagtttgctgtgctattttatattcccatcagcaatatacgagggttccattttctctacattcttgtaaacacttactatttaatattttttaaaacttatagccattctagtaggtgtgaagtgatagctcattgcagttttgattttcatttccctggtggctgatgaagttgagcattttttcatgtatttactgacaattttaatattttttagagaactatttattcaaatcatttgctgtttaaaaaaaatgggttatctttttattattcagttgtaatagttctttatatattttagatacaagtcccttatggggtacatgatttgcaaaatttttctcatattctgtgtcttctcactttcttcatggtgttctttgaagcacaaacatttttaactttgatgaagttcacttatctatttttaattttgttacttatgctcttgatgtcatattgaagaaaccattgcccaatccaagatcattaagttttactcctatatgttcttctaatggtttgataagttttgctattccatttaggtttttgaaacattttgagttaacttttgtatgggctgtgaggtaggggtctaactacactatctcgcatgtggttatccagttgttccagcacaatatgaagaggctaccattctttccccattgaggaatcttggcacccatgtcaaaaaccaatgggctgtaatggtgagggtttatttctggactcttgattctattccattgatctctatgtgcattcttgtgccagaagcacactgttttaatgattgtagtgttttagtaagttttcaaattaggaagtgagtcctccaatttttttttccagattgttttggccattctggggtgacttttaaaaaagatgtagttcaatggttctcaaagcaggagtggttcagctctccttttttggcagtctggagacctttttaggaccttaatctaagtagataaattattcccactttcttttctgagttgctatgttacagtgtatattgacacccatgaaataattgagagaccctggaagtgcttgcctacatagtgagggacaattagttccatgatcatgggcacagaagattttgttttgggaaacaattttgttggtggagttatattcatgcttactcttttatttgtcttcatagcctgcatctccttcagacttcatatctgtttattttcttgtttgtcctctggggtttgggtgttgggtgaccagtcagctggagctggaggaggtgcttagcaaggcagtgaccctggttgggaggagcagggctcagcagggtgaaagtagctgggccttgagtcaggagtggcatctggaaggcctgactgtaagggtcagaagggccagcaggtgggtgtcctaggcacaaacggtggctgctgctgtggactggaggaaggtaagaggccccgagtattccatgttcttactggctccccaactgaggattcctctcctgggctggtgctgtcctgcagcagggaggggttagacagggacggctgcacatcaggccggagtccatgtcatcctcttaggcactgtcactacagattgaggattctgttcataagccaagcctttgcacaaggaagggacccgggctctcaaggaagagcagctcctggtcagacctccatctccttctctctcattgcctgaggcctcaagcttggtctacctggcacaggggtctggatcctcctcccagggttggggtcttactgagctgggcacctgcaggtgggagaagatctggaggggccccatctgccttcaccagattgatgttgagggtccctgagtcctgcaccactatcaggtgctgagcaacttccagtgtcagtgacaaccaccccatggtggaagcagaaccacctcgtgagaaagcacctccaagcctcagtgcttgccatgtgtgggaatttgctggtttcagttgggggcatgttggtgggtggtcatgaattcagggccggattctatgctcacagtgcacatgctggatgtggtacagaccccaggcagggctcagtggggtggttttgggtgtgcacaggtatcttttctggaggagctggtggtgatttggctcccagaagttcctgagctctgcagactcaccaagcactcaatatttgagtgaacattgggcgagagagcagaaggtaagtgtcagggcatcggggttggtgcctctgggaagaggaggaacattctgggaacaaagctctcccccggcttacagggagcttcccatcgctcctgccttgaggatcagggaaactagggcctctgctcttccaggggctgcttgcaggcagtttgctctgggagggggtgacccaggagttgcctctcattttgcatttgagatttaaaaggagaagggacagtatatcttgccaggtcacaaaaattacaggcatcatattgactgaagggcactcctgtcatcactgcaatataccagaatggtcttttaaaaaaataagtgatttaggtttaccagcaactgtaatgcttgttttattcttctagttcaccgttaatgtcacttttgtagttttagcactggcaatgttgattttatgttgactctgatgattttaagctttcatttgttcacatagagatcatcttctttctgaatattaatgcattttttctctatttctactggttattcctgtacatagagtagagaatcacttttcccaaggaggtggaaagcttctgactaccaaaaaaaaaaaaaagtgtcaaaatgctttaaagtcagtaacttaaagatcaaatccaagagtgggcaacagattctgcccagggtctgaaaggtggagaggtgactggtgaggatgtttaaaagacctctcctctctactccctaaatgggggccatccagtgttcttgaggttcagagaaggcccagggctggggcagcagggcactgtcagctcccagctcccaggggccaggagtaagaccccaacactgtccagacactgattgcattcattttgggggagagtagattcttatttaaagaataatacaaaagtctacaaatatgaacataaacagaaattcctttgctacaattttccccttaataagacattccttcctaatgacatatgtgactgcattcatggctgagatgttttctaggatggtgagagcatcagagtggactatctggtgccttggggtcatgcattttcttcttccaatgtctacaggatcccccatgtcccactttgtagtgtaactcagtgtgtgtcattctggtttttgttgtatagatccttggaaagcccatgtcattcctgctgtgaggtacaggcagccaaatggcatcatctctaaacatgccttctcctggtacatcaaattatggaataaatgaaagccattttgacagatattgaagatataagtttctactcttcccacacatgcttctcccaagtgaaggattttactggtgaattgttattagagattagtgtggatcagtgactctgccaggggaaattttgccctctaggggacatttggcaaagtctggaaacattgttggttgtcagagctgggggagggagtcctgctggcattgagtgggtggatggtgctgaacaccctgcagttcacagagccccaccagtttgaccacccaaatgtcaatgctgaggagtggagagccctgctgtgccctcccgcagcttccctgaagcttcccctcacctgctcctcccatgtctccccaccacttccccacttcacccgcctccttacacctcagtcccctccacctgaactcaccccttagtccaaggccagccctgatctccgctctcctggtctccttgctccttagcaggaggcgcccactagatggcgcccttgcccttactggagctcaccgtctccctttccaccctgagacaaatgtggctgcttttactgccacaaccccagccctccacactctagatttgctcagggagcagctcctggacagacctcagggaccccagggaggagcctcactctggagattttgatggcatggtctttgaacttcactgttacccccagtcaggatccaggatgttgggagtgcatgattctgcccggtcccacttcagcaggaccccactgctgagttgtctgtggggacccgggcctctcatctccttcttgcattgcaggagagggatcttagcactgctttcacataaagtcagataatggaggagtgcaggtgagtttgggaaggtggacatgaagagaggttgtgtccctagaggtggcagcagtgagaggatgggcaggtgggaggaacacagcccatccagggttgccagccatattaggagcgacagcctttcctctaagcctccagcctttttcctgaaacattccagaactttccacttcagcacttcccactgaggctcctcaggtctgtccctgagctcccagctgagcctacctacccatctgaaatcctgagtcctgtgtcaccctcgttccccattattctgtgcagttctgtgggacgcccagctctcctgacacccccagtcttcagaatggccatcagcgctgtcgctgtggcaccagggtgactgccgcctggaggctgagtcctggcttcctgacagctgtggggcccgctctaggctcccttgtcctgatcattcatcacctccaggatgcacagcagctgggccagggggaggagcagggacaggtgtcagccaccctgtgtgtctgcaagtcaggctgggggtgtgggaggacgccaggaatgactgaactttctgatttagagggtgagagcttgcactgatggaatttgggatttaataggaaaagcatagcgttttcctattttgtaggcagggtggctggagtttggaatcatagattcccctgggatgtcactgtggacctcagtcccacccgttaggggcacagatttcagaatccacaccctggggcaaagcaggcatgggaggctccatcagcctggccagggctctctatttgtgcagctgctgcaaggagatgtgcactctgatgggaacagtgctccctcctccttggggggcagtatctagctccctgcagcccctctccctgcaggccctgccctctctgaacctcaccttccccaacccgccccccgcaatcccatctcagctgtaatcccaacactttctcatccattatgggtggactgcttgagcccaggggttcaagactatgctggctggacaatatagcgagttgttgtctctacaaaaagacaaaaattagctgtgcatggtggcatacacctgtagtcccagtcactcaggaggctgaggtgggaggattgcttgagctggggaggctgagttggcagtgagttgagattgtgccactgtatacttcagtgtaggtaacagagcgagaccctgtctcaaaaaataaaagtaaaaaaaaaaaaagaaatatggaatacattattgttaactctaatcaaccatgctatgcaatagtccaccagtaataccagtaatagccaataatgaattatctgaaaaagaatacaatttattcttagctatctactgctaaaatttttaagctatcttttatgatagctgaaacaaaagaagtaaatttaaccaaggaagtaaaagacctttataatgaaaactgtaaaacattgatgaaataaattgaaaaagacacacgcacaaatagaagatattccatgttcatgaattggaagaactgatattgctaaaatgtccttaccacccaaagtggtctacagattcaatgcaatttctgtcaaaacaccaatgatattcttcgaagaagtagaagatcctaaaattagaaaccacaaaaattcctaaaacctgcacaaaacaccctgagttgccaaagcaatcttaaacaaatagaacaaagctagtggcattacacttcctgacaatcaaagcatactgcaaagctatagtaaccaaatcagcatggtcctggcataaaaacaagcacatagatcaatgaaacagaataaaaatcccagaaataaacccatgcatctctagctaactgattttcagccaaggagccacatgcacacaatggggaaaggacagcctcttcaataagtggtgctggggaattggatattcatatgcagaagaatgaacctagaccctatccctcaccatgcacaaaaaattaactcaaaatgtattaaataaagacttaaatgtaagaactgaaactatgaaactactagaagaaaatatagggggaaaatccatgacattggtctaggcaaagagtttttggataaaatctcaacagcataagcaacaaaaccaaatataaacaaacgggatttcatcaaactaaaaagcttttatacagcaaagaaaaaaaaggccagcagagcaaagagacaacctacaaatgggaggagaatatatttgtaaatatatacatatatatttgtaaatatatacatctgataagaagataatatccaaaatatataagaaaattatgtttctgtatagttttatctgactgggatacagaggccacatccacagtcccatcctcaaaggccacttgttcccaaaatgtcaagcacatccctcaatgatccatcatcaacacctatgtctgtaggatgaagggtgaatcatgaagcactaaaaaggaagaaggaagccaatcccaaaacaaaatgatgcagggtctggaaagtccaaagcattttttttttttttttactgcatcttcctcctttcttctccacattcccaatcctcactattgattaacaaaacaaaaaaaactgggacccaccatcttccctactgtcaggagatctagcgagattgtttgagtcttagaccaaactttgccataagccaaatttctggctgactttacaatgatatgagctagcacagtctctttttctgccagtcaacttgtgctcggttttatttgcaaccaaatagaggtggtaaccaaatataggtgaccctaaaattagtcatcaggatgaaatcctaaaatgtgcaacaaactgggttgaattcaggattagtagcaacatctctgttgtgggcttgaaaagggggcacccttttatgcagtagcaaaattgctaaattgttgtttgctgagtctttggactctcatcccggattttctatgaccattcaaacagggctgcaatgaacatctatggttgtttagcttggcacacttctacatttctatatagtaatatctagaagtgcatttgctcaatcacaagatatgcacattttataattgactgctatcgaactaccttaaatagccttaatttgttctcaacattgtttaacagggtctgtttaatgtcctacgtccagcaaggacagtatcacttttcttaatatttttcaaattattggaccttaacaaatacttaatgtgcaattaattgattcctttgtattcccatgccttcttttatatgtttccttatagtacacaaaaccacattattgtttctttacttgtgtcattccaccctggaccattcctatctaaactataacattatgagagagagagagagagaaaacaatatgaaaatataaattgattaatcaaaaaaatttaaataggacaaatcaggaagacacaagagagattttaaaattattcagagaataccacaatagctgtaccaatatattttaaaacttagatgaaacggacaactatctcgataaatgtaaattaccaaaactgactcatgaaaaaatggatattatgaatagagcaataatcagtaaagcaattaaaaagacagttgataatttttatttactgacaacaataacaaaatttcaggtcctgatatttttatggtgaattttaacaaattttcaagctcctcctcaaccaattctcagaaggtttaaaactttaacaagaaaacactttctaacacattttcagaagctgttatagcatgataccaaaaccacacaagaaaattatagaccaatctcacttacaaatatacatgcaaaatcaaacaaaatcttagtgaaccaaattcagaattaataatagcaaacaagcaaaatatgttatcatacgtatggcttatatcaggaatgcaagtatgtttcaacatcagaaaatacttctccacattaacagactaaaggagaaaaacgcttgtttaattatctcaataggtttttagagaattttgaaaattttataaagttatgcgtattctgtaaaattgatgaaatccaaccttgatttatttttaaaaattgcctttcctatagaattataggtaaaggaaacacatgcatcctcacagagctacttcaaggctaagttacttcccataagtaacgtatcctgtaatgtgtgcttggcacatattcaatactaaacaaatatttgcaaatcctcaaaccacttctcgctcaaataacccacctttgtcttttgcctttatgttagggttgattttctcaattgtatcttggagatcctttggtgggtctttcagcaattaccctgaatttgcttttctgtttacaattttaattcctgggaactctttcttgttctctgactgcacccttttcatgagagttcagccatcaatcctccagaaccccaccccccccgcccccccaaaaagcaataaagatgtctaaaagcttccttctgggctttcgaatgatgtttaccccaggcatttgttctattcgttcatcacccattttccctacaacttgcctacacttgatatcagatttttatttattagtcacctatcttcttcattggcccattttcctattttgccactggttgttctcaaatgtgttatgattcctggttgtacagtcaagtggttgataatcttggatatacgataaagatttgctctgtagctgtgtgtaagcctatataaaagcttttgtatttttcttcttaaaaaagacaaaagatggttgggaagatccctccagttcaccagttcgaggctgcagtgagctatgatagcgccgctgctctagcctgtctgtctgtgaaaaacaaggggggcggggggcgggggggaagactggagatgtaaatctcccgcagggccctacccgtatccgcaacaggtctctaacaggaacagcctcaggcctgtgttggaacaaggtaggttacagaaatctggaagccagatctgtaacttcagggtaaggactggctctcagggctgatcccccgggctgggtgtcccagaggcacccgcccccgccccttccccaaggcaggccaggacaccttcactcctctccttaggctccccacccccttctcctccccactgtgcctcctggagtagcggtggcggtgccacaggggagcggggcggggcgggctctgagggcaagggggatgggccccgccggggtcactggcggccaccctggaaactcgacgcaggccggcccttctagtgaatcgtcccagccacagctggcctcccagccgcgcttggggcgcctcggggcgcgaatggtgcaggttggggagactcaccacgcaccgtcgggggtcggtccggttattcctcaccgctcggctccagtgggcgcgcgggcctctcctcctcagttcctgcgctgcagtccctccctcacccttcgcagcttgggaatccaactgtgtcattccgacggagcgccgtgaggacctccgagggtgttagcgccaagtgatctctgtccagcgctctgaatatccaagtaaaggagttcaatgaagggcgggtcaacggaggagaaaccgtgactctctcaagggagcccaaggcctccttgtctaattagtgacgcgccaatggatggaggctcttcccaccatctcttcccagcatccagtgacaccaccgccaagggacgggctcggcggaacctgcaggaaagaagcatcggctgagcctgactgcagcgctgtgaagagacaggggaggggatcagtagttggtcccgcgcccaccccctgtttccgcgaggggcggagttgactggccatgcaggcagagggcgaaatgtgaaattccactactcctaccgtttttccctgacccgatggggcggagtgtcgtcaggctaagttccctggcggtaaggtggggagattgaggcgcacacctgccgaacggtaacgcaggattagctaaggcgagctcaggacagaagcctcccgaggagcaggagggcaaaataataaataaataaataaataataaataactcactccttggtctttatttgcggcaggaattcagaaggtgaaagcggggccttaggatctttctgaccttttgggttttaagcaggaggtgtcagaaatgttaccacagggctagctggcttgtggccagcaagcgttcacaatgccctcgatttttcatccctctctgtgggttctttttttcattgtaaggcagaatttctacgattgctcacccactcagagaacctgagctggtttagaccaggtgagacaggctaggtttaccctggtgatgatgtgttgttgccatggcgatcctgcccagtaccagaggccctgcagattcagatgcttggtgcctgtgcttggctgaggggccaatgggtgaagctgccatctgcgggatgatgactgaagcctctaagtcagaatccgcccaggctgagccttagggcagctccatggagcctcggctggcctgggatagagagtccaccactgtgccagcccccagccactgcctaggtcctgtgctgagagccccttgtccagggaaatggcgtccagtggaaaagggaccacccccttgcccttcactcaaggcaggttggtgacaaccctgaagctaatccgttcctagaggagctgcttctgggtccgagttttctctgcagcagagcagctccctggatgggatctgttcaaagtccgcctttcacgcggaattttccgtccttgcaattttccacctccaccactaggggatcctctctgaccgcctcatgccggctctggcctctgagcaggggtttctcttctgcatgtgcgaccttgcgcatgcctagtggccttttgggacctagagctgctccacaccccgatggggttacagagtgcctcgcctccactccaccccaccagggttccttccctggctgggatgggatttcagaagcgccgaggaacagcccagacaggtgtgggagagtagccaaggcccctgtcccggggtggccaggacagcggtggcctcgcataggacctggctgggctgctgcaatcagtgtcctgccccttggagagcaacagtgaaaacaacaagactatcttcacccaccttaagaaagaacagaaccagtatccccaactctgctgtgtatcccaacccaattccattccccaccccactctcagtagccaatatgcaaaatattagaatactcttactgttattattttcaaccacactctgcatcctgaaaaaccatatatttcgttatgtgcttttaaacttcttgaaaatgaaatactgaggctgggcgcagtggctgacacctgtaatcccagcacttcgggaggcggaggcaggcggatcacgaggtcaggagatcgagaccatcctggctaacacagtgaaaccccatctctactaaaaatacaaaaaattagccgggcgtggtggcgggcgcctgtagtcccagctacttgggaggctgaggcaggagaacggcgtgaacccgggaggtggagcttgcactgagccgagatcgcgccactgcactccagcctgggcgacagcgccagactctgtctccaaaaaaaaaaagaaaaaagaaatactgaattttcaaatacttgctttttttttcggtcaaaattatgttctcaaatttcactcctgtagatgtgcgtggctggctgtagtttttgcatttttattattaggtattctcctgttgcattaatatgccacattttatttctctcatgtttttggtgaccacttggggtgttttttggttttgtatttttgctgtatacatgctgccatggtggacatacctctttatacatatttcctgttgtatgcagacacaattttaggatgtgacatcttcagcttttctattgtgtcgtgtgtcttttccttcgtgctttgtgttatttacatattctggacacagattctttgtcaactgtatgtgctgcacatctctttcccagtttgtgtcttcttcttcttttttttttcttaaaaaaaactttctttatagtgttttttttttctttctttctttgttttgttttgtttttttgagatggagtcttgctctgtcacctaggctgaagtgcactggccgatctcggctcactgcaacctccgtctcctgggttcaagtgattctcctgcctcagcttcccaagtagctgggattacaggtgcctgtcaccacacccagctaatttttgtatttttagtacagatggggtttcaccatgtttgtcaggctggtctcgaactcctgacctcaggtgatccaccctctttggcctcccaaagtgttgggattacaggcgtgagccacagcacctggcctgtgttctttcttaagtagatgttacttttaatataatagaatgtatcatattttgcttttatattagtactttttctatctaattcaaacacatccccaagggtctttgtgtgtagactgaccaatttctcaagaatcatgaatgaatactgcttctctttccccaatttatctgtaatgctacctttattataaagtttctatgcatgtgtagaaatagttcctgatttttcactctgtgccaccagcataccaatagcacgctgtcttaaatattaaatagcagagctttatgagacaacttgatgtgcagtaggcaattgcccccttgttactcttcttcagggttctttgttgtaccacatgaattttagaattggcttgtccagctaaaagacaactgcaaggattttatttggaagttcataattctatacataatttggggaaagtattttcataataccaagtcttcctattaatgaacacagactctctctctctctcccccacccccacctgtttagttatttatatctttatggtctgttagttattgtttattgtctttcaaccaggtttcatgtttttctacatagaggccttgcatgtgaaagtctttcttcctagcttgctattacaaattttttttaattgcactttttgggtacagtggcttgtactgtaatccccgatacctgggaggctgaggcagatggattgcttgagtccagaagttcaagaccagcctgggcaacataatgaggtccctgtctcaaaaagtttgttttaaaaattgcatttgctgttattcaacaaatgtcattgtgtctcatatatggatttttatatctgataaccttgttcaacaatcttttgattctaacaatatatcagattcttttgagttttccatatagacaataatgtcatctgtaaattataattgtttcttctttgttatttcttggaccttttattttatatttttgtcttgctgcaaggcaatatccctctatatattgtggggtcttttttctcataaagtggggatggtgaacacccttgtcttgctctctgattgtataaagcatgctttctgtagcattttgtagacgctcttttttagattgaggtaattcacttttatttctggtttactgagtttttagcataaattcaggctgaatttgagctaaagctttttctggagacatcatttgaaaaattcatatgatttactttctttaagtcaccaaagttatgatttacattgaactgagtttctactgtttaactgtattcttgggagaaaacccacttgtcactgaacaatatctgttttatttactgctgtcttgtgtctaaattttcttttaggattttttgtatatgctcagattagcctgttattctcctttctgtatttttttctggtttgggggtcaaagttataatagcctcacaataagagctaagaaaccagccctaatggaggccggggcaggaggtttggagttcaagaccagtctgggcaaaatagtgagacccccatctctatgaaaaatagaaattagccaggcatggcagtgagtacctgtagtcctaggtacttgggagggtgaggcaggaggattgcttgagcctaggaatttgaggctgcagcgaactatgattgtgccactgtactccagcctggatgacagagcgagaccctgtctcaaaagaaaaaaaaagaagaaataaaaaggaaaagataaaagagctaagcatctgtttccttttttccattttctgggagagtatgtgtaagactgtaattaactgtttcttgaataatgggagaactctgtaaaataatctggctttggtgttacctgtattggaaggatgaaaaataccaattcagtttcattattggttgatagggctactcatgctttttgttttgttttgttttgttttgtttttgagaggaagtctctctgtattgccctgttgtccaggctgagatgcaacgttgttcacaggcctgatcctggctcactacagcttctaacttccgatctcaatagatcctcccgcctcagccttcccagtagctaggactacaagcatgcagcatcacatccagcctcttttcctgcctgacccagttctggtttcctttagttttctaggtgttcatccattttatctaatgtttaatgcatttggcataagggtgctcagtgtcctttcattgtctgttgtctgtaactgttgccattttcattcctatttatgagtactggcgtcttctctcactttttcttaataatcctgctggaactttgctttttaaagaacatcttttgacttgttgattcttttttcatacatattaactattttcttattttttgcctttatatttatttcttttcctgtttgaaacattgctcttttcttactataaaaatgggtaagtagctcatgaattaccacctcttttaaaaatcttttctactgtaagcattttagcagtttacatttgcccacaagtaccacttcagctacaccctatgtgcttttacataaagtcttcatttttggtaagacatattctcaaattttaattatcacttgtttttaaatccatgatgttttatttgaaatgttgtttctaaagatacattttctggttatacttttattcttctaatttagcacagtggccacaaaacatggtctgtgcagtgcatacaatcgatgagtaatttctgagctgtagtatttggcataatatatggcaaaatttcctaagttttccatgtgtgctttaaaaaacttccagtaaaatacataaatctgttagatcaagcttctcacattgttcaaatagtctatatgtttactgattcatttgactgcttgatttatcaattacaggtaggaatgtattcaaatctcctattaaagtgtgacactcaagtggctttttaaagacagagatgccaaaccaatgaatacatgattttccccaaagcctgcacaaattctctaatgaaattttaccatgaaagtttgtttaattaaggcttactaaagcagtatgttgtcttttactttttaaacagagaatatatattttaatacatcgtttaagtttatgattaattatctattactgaggataagaatctttgcctgtgctcattcagcatttgcacttcatttatgatctgccttctcatagcttctgttaatttttatactagagacatttatttgtttgtataaatgttgaaggtttttttttgttgttgttgtttttgagtcagagcctcgctctgtcacccaggctggagtgcagtggcatgatctcggctcactgcagcctccatctcctgggttaaagtgattctcctgcctcagcctccagagtagctgggactacaggcatgtgccaccaagcaaggctaatattttgtatttttagtagagatggggtttcgtcctgttagccagggtggtctcgatctcctgacctcatgatctacctgcctcggcctcccaaagtgctaggattacaggtgtgagccaccgtgcccagctgggttttttatattataaggagatgtaatagatagatagatgtttcaaagatagtcaaatgtttttaaaatttaaaacacttttttacaggttgactttcaccatttaatttcatctatgtgttttgccttagagaaattttaaatgctatgtagatctcatgacttataattatgaagcattttgttttctgttttccacgaaacttagcttaactttgagcatataatagttgtaaaggtaggagagtaacactgaaaaaaggaattgcataaaaatggcacattttctgtagagttgtttatcgcctgaaaataggccccatttcatggaagtaagatgatcaggctcaggtccccagacgaaactcttggcatggtttttggagatagtccagggctcagtactggctctatcatttgctacttctcccaaagtaaccaatatctcatccaccctgagcccatttccatatctctaacatgaggataatagcatctaccttacacaccaagtagagggatcaaatgtaggaactaaatcaaagtaccagcactgaataacctacatcctcccacttcccaaaaggaagagagatgtatcccctgttgacaaacgagaccattttgcaggagagaaaggaaatgccagttcacttgcaatgtaaacatgctctctctttttagggatgtccagggacctgagagagaacccatgcttaccaaagagtttctagttccagacacacaggactcgaagggtgacaagtatggttttcagggtccctgaatccacccagtcctcacagaaactcctaaaagctgtcgattgacagcgttgagttcacagctctggtcctcacatgctgatactgcttgtgatatcgaacccgacaggaccccacatcacaattgatttaccaactacaatataatacctcctgaatctccaaattggctcacccaggaacaaaggcttggggtaaaactggattaggagatataagctctgaattttctgagggtgagacacacaaggattctaagtgacacgccacagagtaacgggtctgtgactggaggacccacagatttgtcttactggagacaccacatgcacacaaactccatccttagctgtggaaacaagggtcttttgctatcttagccgaattctgggagtaatttttggaggggaggagatctttgggattgcctctttcaggccctttacaaaaatacctacttcttaaatggtaaagcttacactaaactgaaaaaattacatccttggctttttatgaagtaggtgttggattgaatcactactggaagaagtatggcatcgcaaattctaagcagtggtcaaaggatggatctgttaaattagaaaaatctctaaatttataaaaagattttagattcctttattctaaacaattgacctatttgtactcatgggacaatcaaatttcaaaggagatatgtaacgatttcatggcttgcattaaaaatccttctgataaaattaaagataaaaaatctgaccccctgccaaaaaaatcttttgaagttcatactgcctgctttcaatattctgtgggattcacaatgaaaggtgccttatattgtggcctagcttcaagtttatgccttcgccaccatggcctgggttcaattcccagtcagggccccagcgcctttggtttaatgtttgcgtggcatttgacttttttacctatttagtattggtgagattacctttggtaaaaaaaagtttaaagagtggaaatcgcaattctttgtgttggctaaaatctgattataagagatctggaaggttttatttttctttttcaaagagctctatggtcagaagtcggcttcatgaaaagctaatatttaattatatgtacatacagtctttctggattttctcttttgcctcctgttttgaaaaatatttggatttgagtgaaactccgttttagaaattaattgcttggtacaatatacccatgtaactaccctgcacatgtaccccctgaatctataataagagttgaaattttgacaaaataaaattagattttgaattaaaacaaataggtgcttggttcctctgctcacttctttttaaaaggaattcctctcccatgtacttcttcttttcccttctttaccttccttttggcatctttggtatcacatgaagggatctagagggaattttaagtgactctgaaattccttgagaaatacacaaaaagatcccactcaccccttttgggggtctcctgttctccttgtggagtccagagtcagggacaggctcctccaggtctgcagctctgctctcttttatttcatcttggctgattgctttggttttgtgagtaccaggcattactttgtactgtgagagacacgtcctttgtgagtgcaacggctgctgggtcactggtgagggctgcagtttggagatggctgagagccgttgcaataaatggttgtgattgcagggggctccttgtttctttgcaagtttagatgagaaaggtgcagtttggacacagtttaaaggctgtgaaaacaccaccaatgaatatgatttcctttggggatggtctgattaaaagtgggctgattgttgctgtgctactagccttgaagacatgtttctacagcattgtgcagtgtggaaaaattgtgtggcttggtcttgtggcatgtcccttcttttagagacctcagattcaatgtgaaattcgggatttttgattttcaaagatctagatgccctgccttccagatgtgcctactcttcacatattttaaaattagatcctataaactgcaaatactttgttggcttctgtgagatcagaggtccagttagaaaaggaagacagtttgttaaaattaaaaactatttatctaatctaactagattggcctccaaatatgactttctgacattcagctggttactctgaaaagatttctaaatctcttgaggctcatctatatgtttccttgcaaagaaaaaaaaaaaaaaaaaaaagcaagcccaagcactagtaagaaaaagatttgcaatgtttcatgaaaggagtagatgagtgaagcatttatttgtagatactgggttggatacctgtgcaaagaagaagaggtcaataataaaaattgccaggggatttcttggaacttaacaagctgaattaaatatagaaatgtcaggaaatcaaggcaggaaatactcacttgtggttaggcagacagggcagggttctgagcttgagatggagcaaacagttgtggtgggtgaagttcacatgctttagagctcagctgtcctagtaaagaagcctaagagtctctaaagctcttatgagaagatggattttttttgcctagattaaaaggttaaagaattgctttaagttggataaaataaagctaaatgtttaagcaagttgtgaaaggtttatgaaaaaattaattaaaatatttttgtgtgtaaacatattgactaaagttgaaggggtataattcagcatttctgtaaattgagcattgaaataaaaacacaatgggtttctcttagagcactaacctgctctttaacaaaaattgtaaagggttatagaaagtctataaaaatgttaccttatggtcaaacattaaaattgggtaaatatgtctatcaggttttattaagaattaggtttaacattaatagtacactaatgtaaaggtgaaatttggcttatttggtacaaaaatcatacaggaagcattgtgaaatataaaatgatttttagctttctttgggctatatttctataaatatgttattgatgagggttccaaagttatgggagactcctataattctgctatatctcagtgtacattatcagtcataattataattgtcatgttaaattattgtgggccacagaggtaacagatttccttgtcaattgtgtctttgactatgactaccctaaaacgttcagtcacccatatacacatgttaccttgttttggccctctttagaaggtaattttataatcagctataaagccctaacaggtgctcttaaatgcaaattttgataactttggagattgtgacatcagaagagaggaaaaatgttcgggacacttggagagctaaaatgttcattgatatcaagcaggacaggaattaactgcatgaagtgaactaataggaggctgaagtgatctttttgactttttgcttaaaacgttgctgatcctttgttttgcttttcagagtcaaggcaaattttcttttgagctattgacagcttttaacgattaatcaaaatatactcctatgaacaccatttggagcattatttgtttctctctacccgatttccccagaatttggaaactatttgtgggtattcttaatttatggcaatatagttatttgcataagtgcaataagaatgtgttttctttggtaacaggacacaatttgaaaaactggttattttaccaaggttttgaccagaatgctgtgctttcctttaaggaatcaaacttgacttgtggagctaataaagcctttggaaaactgaccttatatcctgtgaacacagtccctgtacagggttactgatctgtgggaagaaaagaatgtcacattctgacaggtcaggaatcccaagttatcttgaaacttcaagaggacaggaattcacccaaccatatgtatttgatggtagaaatccatggcaggggctcagctttaaaaagtcttatctcagattccttctataaaacaaagtcccattaaaaccaattttaaaagcctatgtgaaaaataattattcttgctgcacctcgtacaaataaagtggcaaagcataataaagcaaattggtcctgtcgtaatttgtctttagtaaaaacgggaaactggggtcgggtgcagtggctcactcctgtaatcccagcactttgggaggctgaggtgggcagatcatctgaggtcaggagttcaagaccagcctggccaacatggtgaaaccccatctctacaaaaatacaaaaatgagccgggcatgatggcgggtgcctgtaatcccagctactcaaggggctgaggcagggaagcggaggttacagtgagtcaagatcgtgccacttcacgacagcctgggtgacagagcaagactccatctcaacaacaacaacaaaaaagggtaactggagagagggaagttatgtttcaaaaacttttggaaactatagtacacctgtttttaaattctagtctggcattcagtttttattattttctacagtttgggttaaattcgtatttctctggctacaagtctcctaaataatcttttcatttgtttcctttttctttccctttttccccatttttcttaattggaaatcactgaaacctaagctgtgctttcttaaagccctgtgaactgaagactagacaaccgaaacttctgaaggaagtagcagcaacctatttatatgtgttgctgttgcctactattatgttttagcaggtgctgcctctacacccccgaaacagagagtgctactgggaacaaatcgactttttccactccagtgctgcattcggtgccccataacgatgaccccctctcagcaggaagtagccagaaagattacaatgctccatctccctatgattcttgtgataaataaatatacaagcatgatagaaatcatgcgcaaattgacagtggggattgtggcaggccagatttcactaatggaggtccccatcacaactacttcagtactgactgagtggttaagttcagtatcaaaagctgaaagtgccagcgcctttctacaaaggctagaatgtaacaaaagcccaccaagggttttacctaggcctttcctgggccttacagcatgacaaaacaaagaaggaattcttaaccagacctgtttaggattaaacaaatttaattgggggtctgaagaaactcgccaggcctccacaaacaagttcattgggggtctaaaggaaccccccccaaacctctgtgattgagcaggagacaaggtcagggtaattgccccagcacctggactcatttagatttaagtaaatgtactgaggctccagagaaaggtctccaagacttagactagagttacagattaaaagaagttaatcacttatatctttagataaatgcacactgacacgtagacatacatcttagaaaatatataagctctggaaaaccttgtaatttacagttggtctggagatattttctgggccttctctctgtaaccggttccagaaataaaaaactctcttcctccccagtttatctgcatctcgttattgggccgtgagaaatagcagccagaccctgagtttggtctgggaacacactggctgggcttcctgcctggcggtagagcttcactgtcctccttcccagccaaaatgtggcccttgaaggcttcctccccaactgaccggttttgggttctaggtactcagggaacaccgtcttcaaggaggccattttcatactgttcctggtttgatttttctgaaattaggaaatgccccttgaggcatccaggattgtctttatttcccctgaagcttcccctcctgaagaaaaaagttctcaaacaccctcaggactcaaaccccaagttcaccctgtgaaacattcccatttcctaaacccaggcaggctcatggccctcagcctctcagaccccatggaaacctcctcccccacttcacgggttctctccatattgagagcctcccctcctcggcacacaacccagagactcaccccaacatgtgtagcaaatcaccctggaaacaatcatggctgaacgtggtagcccatgcctgtaatcccagcactttgggaggcccaggaggtggatcacctgaggtcgggagttcgagaccagcgaggccaacatggtgaaacctcgactctactaaaaatacaaagttcactgggcattgtggtgtgtacctgtaatctcaactactcaggaggctgaggcaggagaatcacttaaacctgggagacagagattgcagagagccaagatcgcaccattacactccagcctgggcaagaagagtgaaactacatctaaaaaaaaaaaaaaaaaaaggaaaaggaaaagaaaaaaaaaatcatgaggcaacattgcatttaacaatattttatttatcaaaagacacttgtctttctcaggtaagtgaaggtctagagatgaaacgagtcccgatgtaaattgccccatgggcattgctgagatcacaagatcatcactgcagcatgcagcacaatagtaaatttctcaggatggaagttcaacaatccaaaaggtagtattttttttcatgatgctcagtccatcatacgaaataaaaataaattccttttcatgatcatccattcagtagaaaaaatgatagtaaatttgttctcatgaagatttttaccgtaacatataggatttatcgttattattattattctttgttttttgtttttttgaagcggagtctcactctgttacccagtctggagtgcagtcgtgcgatctgggcacactattaacctccacctccagggttcaagcatttctcctgcctcagcttcccgagtagctgggattacaggcatgcgccaccacacccggctaattttcgtatttttactagagatggggtttcaccgcattggtcgagctggatttgagctccggacctcgggtcatccgcccatctcagcctcccaaagtgctgggattacaggcgtgagccaccgcgcccggcctcaatttatcattattcacgcatccacaaactgggttcttatattttgtacgtgattttttccattgaggagagatatctgtgcatattcatgctgctcatatttcatccacaaactcggttcatatttcatccacaaacataattttttccgttgagaagagatacttgtacatatttatgctgttcaaattcacatttcatcattcttttacaagaaatagataatgtattttaaggttttccagtggtattacagatattttactgggtgtatagatagaaattaaaccaaacttctttgttctggccgccagtcatgcatcctgttttcaacatagttcacatacaactggttgtgtaaaaatgaaattattttgtttagtacaatcatcaacagttggttgattagatttttaattatcaagttaatcattgtcattatgcttctcatcgcactcgtcattaattgctgtgggaggaaatttgttatgttccctatgagagggtgtatcacaaattcaaataagaattcaacgacaatggactgtataaaggaaataagcaagtccatggaaaacatatttttttccggaaaggattaaaatatttttaaaaaggaattaaaaaaaaattgggcacggtggcaaatgcctagagtcccagctgctcaggagatggagacagaaggattgcttgagcccaggaataagttggaggctgtagtgaacagtgattccaccactgtactccagccagggcaatagagggaaaccctctttctaaaaagacaaaaagaaacaaaacaaaacaaaaaaacaccacatcaaaaaacccaacaacaaaatgaaaaaccaaataacagcaatacaattggagctattcgatccaaagaagtaaatgaaacataaagcaaataaaagagaaaagctaatacctgtgtcctgcaggactcagtccaagttctgctctgactccctcctggtgagccaccccttaaaaagtcacttggggcggggttactttgacagacagtcttctgtcaaagagggaggcggtaaatagcacttttttttttttaatttaacgcctttccaacaaattagcggctatgttgtctaagagtgcaaatgtcagaggtgggtacaggcagcaagaccctccccacaggggcagcagaaggaggaatgactaagggaacaagactttagtgtgctcaactacacaggacaggaaacagatgctttttacaaaagctggtggacttgaaggcagaatattttcaagttcctgtaactgcgaactatgacctgtagcctgtgagagtgactttctgtggcaaaggagcttttgtgaatgtgaggaagttaattatcttaacagtgggaggttctcccggcttatctagctagaccctcgtgaaatcccaagtgtccttaggaaggggaagcagagagagatttgagtccagaagaggaagaaggtgatgtgaggcccagtaggggaacaaagggcgatggcatgtaaacacttagcccccagaagtgggagagggctggggttcatcacaccagaatccctaacaatcagccttattttaattacccttgaaatggaaggaggccttagagagccagaggcttggaggggcaccctctgctgcatacacagatcccaactgctgtgggctccaaataattgcaccagggaaatcacaaattatcaaaaataaaggatgtaaagcttttaaaaaatattaaaagcccaacaaataaaaaaagttctaaatctataaaattgacctcagtctgtatatttagatgagtcatgtgtatatagcgtttcacttcaaaatatatgataaatctctcattcattggcttaaaaataaacacttcaatcaagtctttatcagaaaaattgaaacgttaactcaattgccttttagttcatgtgactttacaaaacttaaaacaataaagtcagttttaaaaattattagtaaagtaaaagaaaaatatcttcacaatgtagacattttgtccacatgagacatgtgaaatattgccattactaaatatttgcaggtcaaaaactgtttccaaaacattttaaataatcatctggcctgtctgttttagagcattcaattctagctgaggtctggggacatgtgaaaggagccacggcccgactccgtgctgggaagagtcagacattttccacagctctgtcctttgctgtgggctctgcaactcctaccaattaaaattgcttacgtttttgttttatttttactaaagaggggttcctaaaagctaacattatactgagtatatgtaactaaaactactaagaaaacaatttcacaattatacaaatgtgccaagtaaatgaaaaaataaactgtattttaataaaggttataaaaagaaaaacatatagtggtgtgaggactgtctcaggtcttcactgagcaagggatcatgacattctatggcggacagctgaccttggctttctgctcctcttgattatgtctactaagtgacatacttactctttttccacctgtcttgcctctaagggtaacaggttttatgagatccctcctagtgctttgcaggtcagcctccctttgctgcattccaattttactgcctataccctccagctggcttttgatgacaaaagtcctggtcccagccattctcagattctgtcatccccgtgggcactatggagctcagcactatgggaggttccccaaaaatctcgttttctatgaggaatggccaccacctgcatctcagtgatgctagtgacccctttcctactcctgtgctcactggtcctcatgaagatcctggttggtctgtagccccctatttttcctattaaagagaaattacagtaagacccatttgtgtgcaaaatcaattttaggcttattacacttggcctgataatttgcataaaatgcagcaagaattcatcggccatataggctacttttgagttaattttcctgggtttttacctaaaaatatactattttggttagagtcttgtgaaaataaccaatgtgttcaattgttttattttaaaaggctcttactgaacactataaatatgtataagttgaatatacaaactatattgtcataaaatcacaacccaaaatgtggagaacgcagagggaaaggtaaatttgctcgcaaaaacatacttcacccaaataactggaaaaaaaaaaagactttcatgacccttctttaaccagagcagcagctttcaaacaaggtgtttgccttggaaatgccattcacaagccaaacggcccttgagagctgtctgtcaggcactgtagaatctagcagctcctcacagagttagaaatagtttcaggaaagagattccctgcttttagtaactgcactttatattcccagatagcgagattgtatgtaaaccatttttatcttattctggaactcttttgggtactttttttttttttttttaaatgatggagtctggctctgttgctcaggctggggtgtagtggtgcgatttcagggtatgagaaaatgcagctggacctggctctttccaggaagaccctcacagccaaggagtccaaagcctggggttttcatctaattccagtgtgactggggtaggagcagctttggtgctgggtgtgtgtgtgtgtgtgtgtgtgtgtgtgtgtgtctatgcctgtgtctgtttagggtgttaggctcgtggttgtctagatacaaatgtcccagggctcaggagccccagggttatgtcaggggcaccagatgaaggtgtcaacagaagttagggcacaagggacaaaggtgagagcaaggttagattcatttaggtgcaagaaatcatagagggaggagggagaggaagccctcctgctaccaccgaggaagaagcgcagcttaaggcagaaagcctgtccggagaggaagtgagtttgagggcagggctctctgggtaaagtacggtctgggacaccagcctgggggaagggtacagaatgcagagtggcctggcgtggggactaagaacagaggagagcagctttcactgggagggtcagtgttttcagtgtccagcactgagcaaggtgagatttgggcagcttgctgtgaaataaggtcaggctctggcattgtccccattgcgtgtgtgtgtgaggggcactttgggagagtgaactctccacctccatcctctcatacgtccttcaaccgagcttgccagttaccctgattccaaggagatctatttattgttgacaatactggatcctagcagaggctgggtaggagcctgggcacaagcaagtggaggagggggcctgggcctgaaagacctgggaggtttgagagaggacacagcccacagaatggagcagatggggtagagtcggcaagcattcagggctcctagtaagttggacaatggagaccctgaaagatccagtaaaacggggagaacaaacaggtccccaactcacatccttgcagtgcctggagcttcagactccagacaggtggggaaggaaaattgagggatgtgaacatgttggagaatgtcgtgccctgaagaatgaagaaaaggggggtgaggaatgagagcaggaacggcttccagtgcctggtgcccaggagaactcagaaaatgggtgtggtggagaggaatcgaggaaccggaagtggtggaagtgtgcagggcccctccgagatcactgtgactgccaggcgtcctccctggctggagagcttcactgtcctccttcccagccaaaatgtgtcccttgaaagcttcctccccaatggactggttctgggtcctatatatttgaaggggtggcctgcctctccacacctgtgggtatttctagttgggtgggaggagagacagagaaaagaaataagacacagagacaaagtataaagaaacaacagtgggtccaggggaccagcactcagcacaccaagggcctgcaccggcaccggcctctgagtttcctcagtttttattgattattattttcattatttcagcaaaaaggaatgtagtaggagagcagggtgataataaggagaaggtcaatgaaaaacatgtgagcaaaagaatctatatcataattaagttcaagggaaagtactatgcctggacgtgcactcaggccagatttatgtttctctccacccaaacatctcagtggagtaaagaataacaaggcagtattactgcaaacatgtctcacctcccgccacagggcagcttttctcctatctcagagttgaacaaatgtacaattgggttttacaccgagacattcagttctgaggggcaagcaggagacagtggccttcctccatctcgactgcaagaggctttcctcttttactaatccacctcagcacagaccctttatgggtgttgggctgggggacagtcaggtccttctcatcccatgaggccatatttcagactatcacatggggagaaaccttggacaataccccgctttcaagggcagaggtccctgcggctttccacagtgtattgtgcccctggtttattgagactagagaatggcaatgacctttaccaagtatactgcttgtaaatattttgttaacaaggcacatcctgcacagccctaggtcccttaaaccttgatttcatacaacacatgtttttgtgagctccaagttgggtcaaagtggctgggtcaaagtggctggggcaaagctacaaattaacaacatctcagcaaagccattgttcaaagtacaggtctttttcaaaatggagtctcttatgtctttcctttctacatggacacagtgacagtctgatctctctttcctttccctacatatattcatggaccacagtcttcaaggagtccatttcctcactgtttttggtttgatttctctgaaattaggaaatgccccattgaggcacccaggattgtctttacttcccccagagcttccactcctgaggcaggagcttctcaaacaccccccaagactcaacacctaatttcaccctctgaaaccttcccatttcttaaatccaggcagggtcatggtccttagcccctcagatgctgtggagaccttctttccctttcatacattctctcaagattaaaagccacccctcctcagcacacaccccagagactcaccccaacatgcattgcaaatcaccctggaaacagtcataagaccacactcatttaataatattttatttatcaaaagacactctttctcaggtaagtgaagttctggagaggaaaagaggagtcctgatgtaaattgccctgcaggccttgctgagatcacaaggagattgttactgcagcttgtagcacaatagtaaatttcttctctggatggaagttcaacaatccagatcgtagtatattccttttcattatgctcagtccagcaaatgtgatgataacaaattccttttcatgatcatccattcagcagagaaaatgtttgtaaatgtgttttcatgaagatgtttaccataacatacaggatttaccattatcaatgcatccacaaactctgctgttgttttttatacataattttttccatcgagaagtgatagttgtacatattcatgctgttcatatttcaaccacaaactctgctggtttttttatacgtaattttttccattgagaagtgatacttgtacatatttgtgctgttcatatttcatgtttcatcatccttttacaataaataggttatattgtattttaagtttttctaactgtagtgcagaaattgtactgggtgtatacatagatatcaaaccaaatttacttgttctggctgataatgcatcatttatttcatagattatgtatttctttgacacatttcacgtacaactaattgcataaaaatgaattttcttttagtatagacatcagcatgtgcttaattcggaatttaattgttgagttaaacatcgtcattgccttttccgttgttattaattgctctggtgggaattttgttatctcatacataagacagtgtgccacaatatctcttaaaatttcaatggcaataaactttatatttaaaaacagggaatctatggaaaacacatttttttctaaaggattaaaatatttttttaaaataattttctaaaaagttaggcacggtagcaaacgtctagagtcccagctactcaggaggctgagacaggaggattgcttaagcctacgagttgggggctgcagtgaactgtgattgcaccactacattccagccagggcaatagaagttaaccctttttctaaaaaaaaaaaaaaaagaaagaaagaaagaaaaaaagcaacaacaccaaaacctcaccaacaaaatggtaaagaaaaaaaaaacagcaatacaatgtaagctatttgatccaaagaagtcaatgaaatttaaaacaaatgaaagggaaaaagtaatacttgagtcctgcaggactcagtccaagttctgctgtgcctccctcacggtgagccacccctttagaagtcacttgggtcataagttaacccgataggaagtgtcctggccaatgaactagggaggtggtaaatggcaccattttaaatttaaattcacggccttttcaacggatcagtagccatgttgggtaagagtgcaaatgtcagaggtgaaaagaggcagcaggaccctcccctagtgcttgggcaacagaaggtggaatcactaaggggacaagactttagcatgctcaagtacacaggacagaaaacatgctttttacaaaagctggtaaatatgaagagggaacattttcaagttcctgtaaccaagaactaccgcctgtaaccggtgaaagtgactttctatggcaaaagcgtttttgaaaaggtgaggaagttaaatatcttaatgttgggaggttcttctggtttatctggctagaccctaatggaatcccaagtgtccttatggagcggggagcagagagagagatttgagtccagacgaggaagaaggtgatgtgagtctgggtgcgggacagggggagaatgatgctatgtggggatctgggctggggaatgacttagctgcatgagcggagtgacttagactcctgaactagaagaaatctagggctcatcacctcagcagccctaaccatcaaccttatttttattacaggtcttccatcgacggactccctaaaaagccagcggcgtggaggggcgccctctattggacaaatagatcttgactactttcggccctcaaatagcctgactaggcaaataacaaataataataatttttttttaaatcatggaaaatattttaaaaaacaattaaaaagttataaatctataaaatctgcttctgtctgtgtgtctgtatatttagatgtctcatgtgtacataatgtttcactaccaaaatatatgatgaaaccctcattaatcggcttagaaaactaaacacctaaatattttctcagaaaatacaaaaactttaactcaaatcccttttaattcacctgactttaaaaatctttaaaaaataaagcatgctttaaaattattagtaaagtaaaattagaacatcttcagaatttagacatttggtttaaattatacaggtcaaatactgcccttagtaaatattttcaggtcataaacaactcctgtaatcttttaaataattgaattacatgtctgttttagagctttaagttctagctaaagcctggggacaaatgaagggcaccatgccccctctctgtgctggaaagagacattttctacagctctgacccttgcagtaggctttgcaactgctacctatcaaaattgcctacatcctaagtttattattaaaaggagttgcttggagttaacattataatgaatatatgtaactaaaactatttctcatacaaagtatatgaaaaagtagaatgtatttttaataaaaagttataaaaagacatgaacatgtagtttttataaaaaacagtaattttgtctagttttgcagttctaaaaagttatgttaaattcaaaaataaaaaataacaagacaagactcaaggtttaaataagttgtaaaagatttgtaaaaattagttctataaaaattttacaaaaaaaagcattggttaaaatttaaggaattattttgtttttacagaaattaaacattcattaaaaacactctgatacaaggccttaatttgggttcatgtatcagaatagcagggttttcttagaatattaatctattctttaaaagaactatgaatgttatgcaaactttataaaaatcttaccttagagtcaaactgattaaaattccatagattttacgtaaaattttattaaaaattaacttcaacaaaaataaaatttgattttctcctttaaacaaaagttttgcgtaatattaaataataaagcatttttgtttaccttttaaactataaacacacacacacatacacatacaccaacactaaagtcagctgacctcatactgtctttattggatattcttgtttaaaaaactatcttctttggaaaataaagttttttattttaaaccatattttaaattatcattttgactaaatccataacatacagtgatctgtaataattctattttataatatcaagtgttttgaagaactccaggaacagccatgagagaacactgtggtttagtaacactttatttcctcagtttgaaaatagttgtctttcttggggaggccggtttcagcagatgaaaacaagagtcatgatgaaaattacccagcagtggttagtgtgaccataggaacattgtcatcaggtcagcagaaaacatatcagcaaatttttctcatactggcagtgtgtaggggtggatgtttacagttcctgaagccccagtggtcgtgtggtcttttagttttgccatttataggcaacttgtggtaactagctcaattagacacattccttatcacaaggacagagggctttctgtatcctagggttcttgccttggcattccagaagaatcaggtcacacgtggacgtggagaatgagtgcaaggttttattgagtggaagtagctctcagcagatgggggagccagaaaggagattggtttctccctggattggggccgttcagcagccctggctctcctctgactgccccaggcaaaatccacatcgttctataagtcggtgccctgctggtgtgctggtgcctgttgtcatgttcctcttcatgtccagccgcctgtgtgttcctccgctgatgtgctcctctcgacgtcaagcctcctgtgtgtctgactgctagggtcttggggtttttataagcacaggatgggtcttagcaggccaggatgatcttgggaaagacaacattcggtcaggaaaacaaaaatgcctgttgtcatctaggtccgtggggacaagcccaggtgtggagcttttagccagggaccacagcctcctgtatccaacacttcccttcaccttttctatatcattcaaagggatcatgcccttcccatcccagcacttcactttcatgtcatttgccccctctgaagaggtacatctaactgccattagaatatggatgatgaccagtcttagctgcttcctgctgaaagggggcattgttttgggggaaaacggcagtcagattcctcccaggggtctctataataaaagatcgaggtggctactttcaggaggtcctctaatgtactatctggtcccaagtcccatttctgcaacctcctcctgatgtcaggagctgcctgagtaataattttatcctttaggattatctgtccctcgattgaattaggagatagagaggtgtgatttaccaaggcctctcttagcctctccaggaaggcagtgggattttcatcaaatccctggttaattatggacaacttagtataattgagaggcttggtcttagacctacgtaagccctctattatgcacacctgaaagtgtctcctcttccagtcttccatctcattattgggatcccatttagggtccttcactggtgctacttctcttccagttggataatattcgctcccttccctgatgctataggtgatgcaaagctcatccccaaatctctctgctgctggcagagcagcctgcttctcagtgtctatcaggttctgactcaaaagtaacataacgtctctccaggagagttcaaatgttagggtgaaattctggaaagcttctatatatctatcagggtcatctgaacacttgcccagatctcccttaatttgctttaagtcttgtagggaaaagaggacttggaccttactgggcccaaattcactgggcatctgtaggaggggcaagagtgagactgggcttgtttgggatgaagatttctaggaggggccaggtgagaggctgaagctggatacggaggttggggtggacccagaggagcagggcttgagggagctggcacgtcagctgggggtgcgtctgggactcgtgtctttaattccctgggcttgaccctggcagccttccccgagacagcaaacaggagggctggaacaatcctacatgtcagcaaaggtctggattgctttgcaaggtatagaaagcctgcacatttggggcctcagaccatgtgtcctcacatccagagaaaagttctaattgcaggatggtattgaaatgaatggtcccttcctgaagccaagccagtccttcctgtaaaccataatttggccaaacctatgtgcggagggctatgagatgcttttcctctggattctgagggtcaaaacagtcccaatggttcaggatacactcaaggggagtacaagctgggggtggtgaggagaactggctgcccattctgaaagacagggaatagaggtgttcctcatttcccttccttcttttggcaaaaagctcagggtgtgatggggagggaaagcaagcatcttcacttcactttccacctcttacccctgcgccctggcaaccttggcaggtgccggccacaggtacaaatgcggtatgtacccatgaagcagggagaacctggagattaggaattaactgccctcacctatgtttccttttctccctgctgttgaaaaactttgagttccctgggcctttttatcccatgaggcatggcctccttctgtgggatggggttcagtcagcaggaattggtcctgtccatttacattgtgcctgttgcctggctttgaattcctcagacctgctttctctttctagggcctcagcctgaagcttggaattgagtttgggactgaaaaagcatttcagaggctgtttatatccatttagtgcctcaaataagccctgctgaatttgcaattatcagccagcaggggtcactcctctgttaacttccctattagaaacagagcggtggggattctcacttagaaaagaaaaaaagagaaaaacagttaaagaggcaaaaagtggggaatgctgggggaagaaccccttgcttagtgcaagtgggcccctctaatccttataactttcccatccttcccccagttcagaccaggttgaattccttggccatggaaggaaaggttccattgatgcagtgggtgagaagcactctgtagggtcctggctaccatcggttttctcacacccccctcatcccaggcagtggagggagacacttctgcgacattgctccccctgccccttcatggctattgggtgtggcctttgcctgctgcaggcatgcctaggtgctggagctgggagggaaaagggtaaggagaggtgccctggaagccgctcatgcctggggctgtcaaggtggaggcatacatggcacctctaggaaaaattggtctgatttgcacctttggcggctgagccaaatgctcattttacttagtaacattgcctcagcctgtagcaaaactcttaacattataaaggaagagataagatccatttcaaataatgtgtgagagagaaaagagatgaaaggaaaacagagtcttttacctgcaggaaagggagagaagtggcagagttttggaagaaaggcaggcccaacagtttcccattcactcacactcaccttccgagatcccagacgagccaccagttgaaatgggaaaagtttccttgtccccctcacaggaggtggagtgggggtgtggcttgcttctttagtactccgctgctcaaacctctagggaagcatacagactggcaagttgtggggctacaaccccatggcagcatctaggggtagatgtttacagctgctgaagccccagtggacatgtggtaccatgtgctcttttagttttgccatctataggtggctttgtggtaaccagctcaattagacccattccttaacccaaagacagagggctttctgtatcccgcggttgttacctaggtgtaccagaaaaatcaaatcacacgtggtcttggagaatgagtgcaaggttttattgagtggaagtagctctcagcagatgggggagccaaaagggagaatagttttcccctgaagtcgggttattcagcggcccaggctctcctctggctgccccagccaaactctatgtcaatccattggtcggtggcctgccagagtgctggtgcctgttggtggattcctctcagcgtcgagagtttttccctctcaggaaagggagagaagtggcagccacccatgtgttcttgcactgatgtgctcctctcgacgtccaacctcctgtgtgtctgcctgctagggtcccagagtttttttaggcacaggatagggcatggtgggccagggtgatcttgggaaatgcaacatttggtcaggaaaacaaaaatgcctgtcctcatctaggtccaggggcacaagcccaggtttggagccctagccagggaccccggcctcctctacccatcactttccttcaccttttctgtatcattcaaagggaccatgcccttcccttcccagcacttctcttctgtatcaataggtgatgtttttaaaatttcccaactctagtgcaggcatggtactagacatatacatagaaataaaaccacacttattcttctggctggcaagacatagtatttttgccaaattatgtgttgttttgaagcattttatgtacccctggtcatataaaaataaagctattttgttcagtacaaacagcagcattttctggattagaaagttaatcatcttaaaagatcatcacggatttttccattgcactcatcactaattgctttggcaaaaaatttcttatctcacgcatgacaaaatcagccgcagtatctcctagtaatttaatggtgatgatctttataaaggaaataagcacatcaagggaaaacataattttttttaaaaaaagagtaataaaactttttaaaagtcttttttaaaagactgcttttctaaaatagtaaaataaaactccaccaataaaaccaccaacaaaacagaaaagaaaaaataatgatatgatcggagctatttgatgaaagatggtaaattaaatttaaaatgattagaagagaaaaagcaatacctgtctcccgtaggtctcagtccaggttctgctatgcctttctcctggtgagccacctatttaagagtcgcttaaagcatatgttaatccaacaacagcagattaaaaaccaatgcaatctgaactatttgatctaaaaacataaataaaatttaaaacaaataaaagagaaaaagcagtacctgtgtcctgtaggtctcagtccaagatctgctctgactcccttgtggtgagttagccctttagaagtcacttggggtggggcatatgttaattccactaacattggttctggccaatgagtcaggaaggtggtaaatggcaccttttcttcttgctgatttctttcagttcctttggagtctggacattagtcctttgtcagatgcctagtttgtgactactgtttcctatactgtgggttgtgtgtttaccctgctgatatttcttctgccttgcagaagattttcggtttcattaggtcctattgatcttattctatttttatatttttgcgtttgcttttggggcattagtcatgactacttggcctaagccaatgtctagaaaagctttttggatgctatcttgtagcatttttagactttcaggtcttagatggaagtttttatatgctttgttaaagatcaggtgactgaaagtaccgggctttgtttctcggttctctattctgttccattgctctatgtgcctatttttatacttcctgcaccatttattgaataaagtgtcctttccccaattagtgtttttgcatactttgttgaagattagttgtctgtaagcatttggctttatttctgggttctctattctgttccattgctctatgtgcctatttttatacttcctgcaccatttattgaataaagtatcctttccccaattaatgtttttgtgtactttgttgaagattagttgtctgtaagcatttggctttatttctgggttctctattctgttctattgctctatgtgcatattttataccagtatcatgctattttggtgattgtagccttgtagtataatttaaagcctgccttcagatttgttctttttgcaaagtattgctttggatatgcggtcacgtttttggttttgtataaattttaggattcttttttctagttctgggaaggagaatgatgatattttgatgagaattctactgctctgtagatggctttggagagtatggtcactttcacaatattgattctacctattcataagcttataatgtgttcccatttgtttgtgtcaactgtgatttctttcagcactattttgtagttttccttgtaggaaacttacattaacctacttggttaagtatatttctaagtattttacttattaaaaattctcagggaaatgcaaagtaaaactgaggtgggaaattaaagaaaaataaaattaaaaagaaagggaaataagctttcttgtattaagctaacttgtcccagaggcagcaacaggcacagcccagacccaggaaaagtcttgataatattatttattgtattctggagactcttccagcactccttcaatgtagggagaagaaaaacaaattttcctttgttttatggtatgagtttatagattcttgttctctttaactagtaacttcaagtattctgttttatctaagaagtatggcaaaggtcatgagaagcctgagcaggcctgaactacagctctctaggcaccatagtgaagataaaccaatgcaagcctctttagagcaaaacctagataatagacatctgggttgcatagcaacagttatgtgcaatcctgagttatgaacctgttacaatttgattaactgtctttttcctgcctctgtatccctgctttcacaccactgtaagcttgcttcaagctggcccacccccttttgtgaagtgtgtataaaagtcaagtgctgtctttgttccaggccctgtctttggacgtgagtctgctgggcctgagagcactcaataaaagattctcctgttttaacccaaagcctctctctcatcctcctaaatcccacaacaaaaccacaatgagatgctatcttaatcttgctagaagcccataatttaaaagtcagaaaacaatagatgttggcatagatgtggtcaaaagggagcactttgacactgctagtgggaatttaaactagtccgaccactatggtaaacagtatggggattccttaaagaactaaaagtagaccattcattccagcaatcccattactggctatctacccaaaggaaaagaagttattccataaaaaagacacaagaatatggatgtttatagcagccgattcgcaattgcagtgatatgggaccaacttaagtgcccatcaacgaacgagtggataaagcaaatgtggtacaccatggaataatacttgataataaaaaggaacaaaataatgtcctttgcaacaagttggatggaactggaagccattattctaagtgaagtaactgaggaatggcaaatcaaatattgaatgttttcacttttaaatgagagttaagctatgagaatgcaaaggcataagaatgatataatggacttggggactcagggggaaaggttgggagggggatgaggaataaatgatgacatattgggtatattatacactgctcaggagacagatgcctcaaaatctcagaaattaccactaaggaacttttatccacataaccaaaaaccacatatattccacacactattgaaagaaacataaacattattttaaaaaataaagccacttttaaaattagcaaaataaaataaatatgtcttcagagtttagatattggatccaaattagacagatcaaatactgcctttactaaatattttcatgtcattaacaacttctaaaacctttcaaacagttttttgacatgtcttggaaccatccatttctagctaaggcctgggcacctgtgaaatagggccatgcccccccttatactgggaagagtaagatatttcaagactaagatgttttctacagctccatctttttctttaagctctacatcaaggacataattaaaattggttgtctcctaagtggtttactaaaaatgcatacttaagagttaccattataattaatatttgtatctaaagctacttaaaaattttcacacacaaatctgactgaacaagtaaaatatattttaagtcaaagtttataaaaggacatgagaacatagcttttatgaaaaaattagttttgtcaagtttagaggttttcaaatattttaaattcaggaaataaaataacaaaaagacaaaagaaaatggttgaacaacttagaaaaggtttgttaaaattcatcttataaaacaatctacatgtaaaaagtgggctaaaatttgaaagagattatttaggttttccataaattaatccagaaggggtaggaagtcttaagaatgaggaaggacaggaggaaggggaggtcatcctgacactgcagaggcagaagtgcagctgaaggtatgaaggctaagaggggaggggagtttgagtgctgctgcctggctgtcagagcagaggagggtcctgggcaccagacttgaggaagggatgaaaatgctgggcagacctgtagtgggcccttgagatggcagatagtggtttccagagagagggccattgttttccagtgcccagcactgagcagagagagttttgggcagtgtaaaaaaaaaaagagaacttacctctttctcgttttagaaaaagaacagtctaagaatatcagcagggaaactctcagtgcttcaaggggttaaacgcccttttggctttcttgtgttggtttcatcatagaggaggagaaacttcttggaagtgttcctaaaaacacaacacgtctgcttctcctttcaaaaaaggaagtgctaaaacacgaacactctagatccaaatattaatacggatgtctaaatgcttccgttttccaaggggcagaaagctaaaggttgtaacctattcatttcagtcaaagttggtgaaagggaagcaaaggaactgggtggggcttggaaggatgacgaagctcaagctcattggccagcaacctctctcctgggggcgggaggggtgagcatacgtcattgctttggcttctataaaatgaggaggactcaccgagtgtgaagagtccttctggtgattgcagctgagagcacactcacgacgttctgcaaggattctctgattatgattctgaagggaaaagcgatggaatggacagcagagattgtaattttctttatcttgaattacggaagaaagtatctaggacagaaatccacgacaagtccttggaaccagcagatctcttcgttcacggagacgttgacgtattctctattgaagaagattcttaccttcttactggacaaggttttgtcagttctgcgtgactggattgtccgggagactctgaggaaactgatgtcacatgtttttccaaagaagatgtttctggaaccaacaactgtgattgtggtttgaggacttctgagagttccagtacaggaaataagcagaacatcagctggaggctaaacggatccagacttcactcttcacttcccttcctattcagtctattgtgcctgctgactgagaagcttggctggtatgtgagcaaataaacggaactattcagaaggagatgttgacatattctgtattgaagaagatccttatcttctcacctgacaaggttttgtcagttctgtgtgactggattgtccggaagactctgaggaaactgatgtcacatgtttttccaaagaagatgtttctggaaccaacaactgtgattgtggtttgaggacgcctgggagttccggtatgcgaaataagcagaacatcagctggcggctgaagggatgcagcctccactcttcacttcccttgccattccatctattgtgtctgcctgactgagaagcttggctggtatgtgaggaaataaacggaattataaacaaggagattgtttctcatctacttcattctgttgtggcttttctattttggggttcagggtgtgtgacaaggaccaaggagatgaaaggtttcatgatggagaaagcccaggcaatcagattgaagagctatccacagggaatcttggctgctgaggggctgcaccctgcaacggactgaccatatgacagaaaagggttttaaaggctcaacttctggactgagaacccagagtaatttgggaacctcctctgtgaggagatatgaaagctgggaatcatgacatccctaggaatggaaggcacatttcctgatggaaggggtgctttggaaaacaggagcagagtagacacagcagccttgtggatacgggtgggcagcatgcatgggtgatgtgaacgtggagtgtttgtgatcgaaactcaaaatgtctgacaaagtgaaaacctagaaaccacaatgaggaggaagagtttgtgagggcaatcactctccccatgtgtgaaaatcgggggctcttaaaatctcatctggagaggtgcagtctaccaaactctgggactttagcctccccttttaaaaaaccgtgcatcaataccaacgtccgaaaccacagaaataacacctggcttgcatggagacaaggacaaaaagccgtcatgatgagttgttctgctcacttgctgcctctgttcagtgcacaggatattgtccacccactagcaggctactgcaagagaagtgtgcaatatgttccctatgtgccatatatgtgccatatggcccatatgacaactgagtcagaaaatatctgatgccctcagagttacactccacctggagcttgcccccagccatccaggacctaggctccctaccctgtccaattttctggtgttttgggggcttcattctctaaggtgtgcccactctttactcaaaccaaaacacccacatattcctgcccatgaacaaccaatcaaccacttctcagttccacatcctgctgttgggtctctagtggtgacactgtaactcccaggtcatagtggtgacactataacacctagctaaattgatgccttgtctctaggaggccatgggctcctgcaggtctcatctgactctctgtagccttccctgacaatgctcacaatacccaagccagagccacattgacagcaagctgctctcatcttacctttgccagacctggccactggaaaaggctgaccctcatcctgcaatgcctatacctccaacctttgtctcaagctggtgtcctggagggacttctaagcagaaaacagattcagactcccatcctctcctgaatggcctcatatccaattctcagaccctcagccttcattgtaaggacacttcatccatgcccttgagtattctgtctgcactgtgtattctgcaatagattctcctccctctgcgaccctcaactccttccgcagactttttgttttcttgatcatctaccatagtcttccactgggacactgccaagcccattctggagagtgagttgtgcaagtacactgccccccatctacctttcgggaggtgtatacacccttctttctcccaggtctggaggctttctattttcatcctgaggcatctccacctgctcttggattcttcaaattgacaaccaccagttaacaagaactatgtgtcaccaaatagccaaacaatggcaattacaaaaataaaattaatagctgtaacccccattagcaaggatacacaaatcaaatcagggatagtgggtgaggaagtctgcctaacattcaaggaaggattctgaagtgatacaaaatcattgcctttgctatctttagaatggacactttcagccaggcacagttgctcagcctgtaatcccagcactctgagagccccagttgggtggatcacttgaggccagcagcttgagaccaccctgggcaatgtgcagaaaccccaactctactaaaaatacaaaaatagccagttattgtggcacatgcctgtaatcccaactccttgggaggctgaggcacaagaatcacttgaatctgggagccagagtttgtaatgagcgaagatcatgccactgcactctagcctaggcattagagtgataatctgtctgtggaaaataaaaacattcctcttcaaagttttcttctttaaatcataaatgttggaattaatatatcctctttgaaactcactttcttcaagcttctttatttgatggtagtaaatctttgttaagctttatgaggcaagagtaatggaagaagcatattatatatatttatactctaacctcagtgcttgttctagcaagctcaggcatgcgtgaatgtgcccaggcatgttccagcccataccttatatcctttccttattgggaaatgctgttactcctataagcattcttgtaagcaacttcctctttttctttgtctccactatctttacctattgaggacagttttaggttcttagccagttggatgtagcatagactgtgaggtccaaccccagccaatggagatagcacacagcagtagcgacctcatgcttaacagataaatattcctgtctccctttgtttggggtgctctcagctgatgagcaacaccctttctaaagaaattaaagttgtcttgctgagaaaacttttggtctaaatgctgattcttccttgcagcactgaagaagaagcaattatttccaacactttctcatacacaaaaaaagaagaaggtggaagaaaactttcttgtgcaccctatccctcactcagaaagacaacagaaggctcctagtggcaagccctagaggattcatttcttttgggaaccctcttggctgggatactaggactcaggtcaaactcagcattttcagtgtgtgggaagtgtgcttgggtttcactgttacttccaataatgtgatttggtccttggggttcaccaaattttggtatggagtggtgaaccctgttaagtttaagtgtctataaaattaacaaagcaaaataaccattctgccccatggttcagagaccaaatattgtgtaggaaatgctttagcgagagaaacagagaagaataaaaaatgtcctcaagcgctgcattatttcttgttatcgtccagatcttagaggaaaggctttcattttccctcattcagtatgatattagctgtgcatctgtcatttatggcttttattatgttggggtatgttccctgtgtatgtagttttttcagggtttttgttatgaagtgatgttgaactttatcaaacgtttttcagtttcagttgaaacgatcatatgctttttgtccttcattctcttgatatgatgcatcatgttgatgatttccatatggtgcactgtccttgcatcctgggcatgaattccacttgatcatgacaaatgaatttttaatgcattcttgaattccgtttgctggtattttgttgaggatttttgcatcaatattcatcagagatattggcctgcagtttctttttttttcttttttctttgttttgttgtttgtttgtttgtttgttttgatgtgtctatgtctggttttggtatctgggtagtagtgttccatccccttttattttttagaataatttgaataagactggtgttggttctttaaatatttggtagaattccgaagtgaagtcattgggccccgggcttttctttagtggaaggctgtttattatggcttcaatctcgttacttattattggtctattcatgttttgaatttgttccttatttaatcttggtaggctgtgtgtatctaggaatttgtccatttcttttagattttcaaatttattggcacataattgcccattgtagcctctaatcgtcatttgagttcctgcagtaccaattataatgtctccttcttcatttttgattgtatttatttggatcctgcccctttttttcttacttaggctgcctaataatttcttaattttgttgaactttttcttttgtttgtctcgctctgccaccaggctggagtgtagtggtgtgatcttggctcactggaacctccgtctcccaggttcaagcaattctcctgcctcaccctcccaaatagctgggactacaggcaagtgccaccactcccagctaatttttgtatttttagtagacacgggttttcaccatgttggccaggatggtctcgatctcttgacttcataatccacctgcctcagcctcccaaagtgctgggattacaggcatgagccactgcgcccagcctaattttgtttaaattttcaagaaatcaacttcttctttcattgatttctgtattttttatttccattttatttatttaaactctaagctttattctatcttcttctcattttagctttggtatgcttattgcctctctagctctttaatgtgcattgttagattgtttatttgaagttcttcctctctacaccataagacgtaagcatgtcctcattatgtcataagatgtaaccacttacagctataaacttccttcttagttctgcttttgctgtatctcataggctttgttatgttgtgtttccattatcaattgtgtcagaaatttttcaatatttttcttaatttcttcattgagcaactgatcatttgggagcatatttttaaacttccatgtacttacatagtttccaaaatacctcttgtgatcaatttctagttttattccactatggttcaagaagatgcttgatattatttcaattttttttcacattttaagatgtgttttgtgacctaacatatggtctactttttttttttattaaactttaagttgtggggtacatgtgtagaccgtgcagttttgttacataggtatacacgtgccatggtggtttgctgctcccattaacctgtcatctacattaggtacttctcataatgctatccctcccctaacctccaccctctgacaggacctggtgtgtgatgttcccctccctgtgtccatgtgatctatttttgagaatgatccatgtggattagaatgctgtggaaaagactttggattcctaatatccagggagggagacgatgatattactttcaatatcacacgggtgtacacactctctgtgacattgttcctaatatccagtggaagagaggatgatataacacccagggagggagaggatgatattactcttaatattgcagggtgtgtacccatgcctatgatattgttcctaatatcaggagggggagaggatgatattactcagaatatggcagggggtgtacacacactctgtgacatggttcttaatatacaggggagaatgggacaatattactctcaatatcgcagggggcgtacaaccctgtgatttgttcctaatatacaaaaggggacagtatgatattgttcctaaaatcgcagaaggtgtacaacgccctgtgatattgttcctaatatccagggcgggagaggatgatattacccccaatatcacagggggtgtgcactttccctgttacattgttcctatgatccgagtggggggaaatgacattagtcccaatatcgcaggatgtgtacactactcccccatgatattgttcctaatatcaagggggagagaggaggatattactcccaatatcgcaagggaggtacatcctccatgcaatattgttcgtaatattcaggaggagagaggaagatattactctcaatatcgcagaaagtggacacccaccctgtgatgttcttcataatatccagggaagcagacgattatatgactttcaatatcgctgggagtgtacatcccttttgggatattgtttctaatatccaggaagggagaggattatattacttccagtattgcagccagtgtacacatttcttgtgatattgttcctaatatccagaaagggaaaggatgatattactcccaatattgcaggtggtgtacacccccctctgatattgttccttacatcaaggaaaagaaagaagaatattactcccaatatcgaagagagtgtacacccctcctgtgatattgtatttaatatccatggggaaagaggatgttgttactcccaatatcgcagggggtttacacccacactgtgatattgttcctaaaatccagtgaaggagaaaataatattgctcccaatattgcagggtgtatacaggccctcccccgttatattgctcctaatatccagcggtggagaggatattactttcaatttttgcagggagtgtgtaccccctctctgatatttttctaatatcaaggatgggaaaggatgccattactcccaatatcgcaggaggtgtacatgccctgtgatattgttcctaatatccagggaggtagaggatgatattactttcaatattgcaggggctgtacaccctctatgatgttgttattaatatttaggttgggagaaaatgatatttttcctaatatcctgggaaggaaaggatgatattactgtaaatattccagggagtgtacaccttcctaatattctaatattgttcctaatatccaggggtgggagaggattatattactcccaatatcgcagtgggtgtacacccctcctgtgatgttgtttctaatatccaagcgaggagaaaatgatatcactctcaataccgcagggggtgtacaccttccccatcatatcgttcctaatattcagagggaaagaagatgatgttactttcaatatcgcaggggttgtacacaacccctgtgatatttctcctaatatccaggaagaaagaggatgatattgctcccattatagcagacggtatacgcctccctgtaacattgtttctaatatcaagactgggagaggatgatatcacttccagtatcgcaaggggtgtacacctcccccgtgatattgttactaatatccagggggaagaggataatattactttcaatattgcaggggctgtacacccccgtgatattgttgttaatatttaggttgggagaaaatgatattagtccaaatatcgcagagagtgtacacacttccgataatattgttcttaatatccatgggggagacgatgatattacacccaatatcgcagggggtgtagtctccccttgtgatattgtccctaatattcagggaagtaaacgatgatgttagtgtgaatattccagggagtgtacaccccctttgtgatattgtcctaatatccgcaggagagaagataatattactcccaatatcgcagggggtgaacacaccccctgtgatattgtttctaatatccaagcgaggagaaaataatattactcccaatgtctcaggggatatacaccttccctatgatattgtttctaatattcaggtggaaaacgggtgatattactcctaatatccaggaagaaaggggattatgttactccccttatagcagggggtatacacctcccctgtaatattgttcctaatatcaaggctgggatatacgtggggggaaggatgatattactcccaatatcacaggggttataaaaccttctgtgatattgctcctaataaccatggcggaagaagatgatattactcctaatattgcaggaggtgtacactcccccattatgttgttcctagtatgcagaaaaggagaggatgacattattgccaatatcgcagggtgtgtacaccacccatgatattgttcctaatatttagagggacagaggatgatattactcccaatatcgcagggggtgtacacgcatcccctgtgatattgttcttgaaatcgaggggaaagagaattatatttctctaaatattgcagagggtgtacaccgccccctgtgatattgttcctaatagccgggggcggggggagataattaaattactttcaatatctcagagagtgtacatcccccttgtgacattgttcctaatatccagagcaaaagagaatgatattcctcccagtatcgcaggaagtgtacatttaacctgtaatattgtttctaatatccagggggaagagaatagtaatactcccaatatcgtaggggttgtacaccttttctgtgatattgttgcaaatatttagaagagagagagaatattactcgcaatatcacagggaatgtatacttcccctgtgatattgttctaatatctagaaaaagagaggataatattactcctaatattgcagggggtgtacacccccacttgtgatattgttcctaatataaaggaaggtcgaaaaacaaacggggagcccagggggaaggaaggcaggcgaggaagaggcagcgccggggcgccggagggagcagccgggccgcggaagcgcgagcacgagaccggtcgcggtcgcagtcgcatttttgccgttgtcgcggccgccgccgccgaggcttacccggggatgtctgagcccgcgcctcgcggcccccaagctccacgctgcgcccgctgtcccggcctctaagggccgccacgtccctgcggcgcgcgcaggcagaaagcggcttcgtgccggcggagggggcccgggcgggccgggaaaggctgccccaggccccgcgcctaccccatcaccgcggccggcgccgggccgggaggatgagcggtgtggggctctgaagcatggagggggttttgtacaagtggaccaactatctcacaggttggcagcctcgttggtttgttttagataatggaatcttatcctattatgattcacaagatgatgtttgcaaagggagcaaaggaagcataaagatggcagtttgtgaaattaaaggtgacagctttggaggggaccacccttgattggatacataaattctgttcattcagcagacaacacaagaatggaattaatcattcctggagagcagcatttctacatgaaggcagtgaacgcagctgaaagacagaggtggctggtcgctctggggagctccaaagcatgtttgactgatacaaggactaaaaacgaaaaagaaagaagtgaaaccagtgaatcgctgaaaaccaaaatgtctgaacttcgcctctactgtgacctcttaatgcagcaagttcatacgatacaggaatttgttcaccacgatgagaatcattcatctcctagtgcagagaacatcaatgaagcctcttctctgcttagtgccacgtgtaacacgttcatcacaacgcttgaggaatgtgtgaagatagccaatgccaggtttaaacctgagatgtttcaacggcaccatccggatcccttagtttctcctgtgtcaccttctcctgttcaaatgaggaagcgttctgtcagccaccctggttcttgcaccagggaggagtagccactgtataaaagaaccagtatctgcacttcaccgactctcccagcgacgccgaagaacctactcagatacagattcttgtagtgatattcctcttgaagacccagatagacctgttcactgttcaaaaaatacacttaatggagatttggcatcagcaaccattcctgaagaaagcagacttatggccaaaaaacaatctgaatcagaagatactcttccatccttctcttcctgaagaaactgtagtgtccaactttctctaagtattgctatgcaaaagctgctgtaattgaactattgttatagggagtagttttttcccttaggactctgcactttatagaatattgtaaaacagacaaacaagaaaacaaaccacatacttttgaagcgtgttttatctttatatagtttgtttgcaagagtattttcctaataacttcacagtatgaatgtgcatcttttttttctttttttaacaaatgatggtgtaacattttgacatccataaggacaaatgtagatatttttctaaaaaaccgtgaggggactgacagcttggtcagggtgtattgtagcttataaacatgaaatcttacaaggtttcagtttgacagaagtgtgatatatgtaacttgtgccatggaccaaatggtcactttaccacagctaaaaatgagttatgatagcagcttgatggtgattgcattgtattcctttaatcaaaaaggaaacgcaatattctaagtatctttagcccaaataccatgacatattgagcatctttaaataaccagactgtattgtccttcatatgtgaagttgacactactgatttgtcaataccaaattttgggttaaagtgtttaatttttatttatttattttcttgttgcctcaaaagatgattgcattctaacttttgtgacctaccaaatttaagatgtgtatacattgttctttacgttgttctagaaaagagattttaatgctgtagtgacttagctcacttacatcagagaaataaacaactttcaatggaaaaaaatatatataaaggaaggaagaggatgatattacttctcatatagaaggggttgtacaccccccttgtgatattgttcctaatattcagggagggagaggattatattactcccaatatagcagggagtgtacacccccccccccgtgataatgttcctaatattcagggaagcagaggatgatattactttcaatatcacagggggtgtgctgtccccctgttatattgttcttaatattcaggggggagaggatattattatgcccgatatcacaggagaagtacaccccacaagtgatattgttcctaatatccaggggtaaagaggatgatatcgcaggtggtgtacacccctccccgtgatattgtttctaatataaagaaggagagagcatgatattactcccaatatcgctggaggtctacaccccccttgtgatactgttcctaatatccaggaagggaaacaatgatattgctgtgaatattccagggggtgtacacccctttgtaatattgttcctcatatccagggggtagagaggatgatattactcccaatatcgcagggggtgcacggccccactgtgatattgtttttcatatccaggaggggagaggatgacattactctcaatatggcagggggcgaacaccccctgtgatattgtgctagttaggttgggagaaaatgatattactcccaatatcgcagggggtgtacaccgctcctgtgatattgttcctaatatccatgacgggagaggatattactcccaatatcgcagggggtgtacctctcccctgtgggattgttcacagtatccaaaagggaagaggatgatgttactcccaatatcacagggagtgtacaccaccattgtgatattgttcctaatagccagggaagaaaacgatgatattattgtgaatattacagggggtgtacacaccccctgtgatatggtttttaatatacaggttggaaaaggatgatattactcccaatatcacaaaaggtgtacacacccccccatgatattgttcttaatacttcggtggggagaaaatgatattagtctccatatcacaggggtgtgaactcctccggtgatattgtttttaatatcaagaggggaggagatgatattgctttcaatatcgctgggggtgtacatccctcctgtgatattgttccttatatccaggcgaggggaaaataatattactcccaatagtacacaccccatgtggtattgttcctaatactcagggggaaagaagataatattactttcaatatcacagggtttgtacacctttcctgtggtatagttttcaatatccagggggaaggtacatgatattactcccattgcagcaaggggtgtacacacctcctgtgatattgttcctaatatccagaagtggtgaggatgatattactcccagggggtgtacaccccacctatgatattgtttctaatatccaggggaaaagagtgtgatattatgcccaatatcgcagagggtgtacacttatcctgggatattgtttctagtatttggggagggaggagaggatgctattattctcaatatcgcagaaattgtacacccccgctgtgatattcttcataataatcagggaaaaagaggatgatattactaccaatattgcagggggttacacttcccctttggtagtgttcctaatatccaggaagaaagaggatgatattaatcccattttccaggaagtgtacacccaccgtgtcatgttgttcctaatatccagcagggaagaggatgatattactcccaatatcggagagggtgtacacttcccctgttatattgtttctaatacccagggggaagaaggatgacattactgccaatatcacagggtgtgtaccccaccctgctattgttcctaatattcaaaaggaaagatgaaaatattactcccaatatctcagggtgtgtacacctctcctgtgatatcgttcctaatatccacaggaagagagaatattactctcaatattgcaggggggtgtacacccccctgtgatattgttccaaatattcgggcggggagaggatgatattagtcccaatatcgcagggggtgtgcaccaacctgtgatattgttcctaatatccatgcgggggaggacgatatcactctcaatgtcgcaggaagtgtacacctctcttgttatatttttcttaatatccaggagggaaaagatgatattactgccaatatcgcagggtgtgtccaccccccttttatattgttcctaatatccaatggaaaagaggatgacattgctctccatatcccagaaggtgtacaacgcccctgtaatattgttcctaatattttgggggaagagaggatgatataacttataatatcacaggaggtgtacaccacccctatgtattgttcctaatatcctttaagggagaggatgatattactcccaatatctcaggtggtgcctattccccctgtgatattgtttttaatatccaggggaagagagtatgatattacgcccaatatcgcagggggcatacaccctctctgagatattgttcataatatatagagggagagaggatgatattacttccaatatcagaggtggggtacaccccccggttatattattcttgatatccaggaggggagaggttgatattactggatatatagcagggagtgttcacatcttctgtgatactgttcctaatatccagaaaagtagaggatgatattactcccaatatcgcagaacgtgtacacctccctgtgatattgatcctaacattcaaaggggagaggatgatattactcaaaacatcacagggcatgtacactcccctgtgatattgttcctagtatccagaagggagcaagataatattactttcaatatcgcagggggtgtacacccctctttggtatgtttcctaatatccagaaggaaagagggtgctattactttccatattgcaaggggtgtacacccccctgtggtatggttcataatatccagggagggaaagggtgctattattccccatatcgcgaggcatgtacaccctgctgcggtacggttcctaatatccagggggaaagaggatgctattacttcccatatcgcggggtgtgtacacccccgtgtggtatgttttgtaatctccgggaacgaagagggtgttattacccctcatatcgctggaaatgtacactcccctgtggtacggttcacaatatccaggggattgagggtgctattactccccatatcgcggggggagtgcacctccctgtggtatggttcgaaatatccagggtaagagagggtgctattattccccattttgcaggaggcgtacacccctctatggtatgttttgtaatatcccaggtaaggggtgctattgagagaagagagcaaaagaccccccccatattgttctgtattattttatactcagtacctgttttaagaagaaacaaggaagcgaaaccaaaggcaggcagcccggcgccaggcaccagatccaaaaccagacccgaaaccaggcctgggccttcctgaccttagcctgaaagttaaaattcaacccatgacctagcaactgatgttatccatagattccagacattgtatggaaggacattgtgaaatttcttgttctgttctgtttcactctgagtactggtgcatgcagcccttgtcacatacccactagattgctcaatcaatcatggccctttcatgtaaaaaccttagtgttgtgagcccttaaaaaggacagaaattgtgcactcaacaagcttggattttgatactctagtctgctgatgcttccagctgattaaaagccacttccttcactacctcggtgtctgtgggattttgtccgcggctcctcctgctacactgtgactccccttatagagaggggtgtacacccccctttggttcctaatatccagcgggggagtaggtgctattactccccatattgcggggagtgtacacccccttgtagtacggatcgtaaaatcaaggagggagagaaggtgtaattatccccatatcacagggagtgtacacccctttgtggtatagtttgtaatatccacgacgggagagaatgctattactccccatatcgtggagggtgtacaccgccctgtagtatggttcgtaatatccggaaggggagaggttgctattactccccatatggtgggaagtgtacacccccatgtgatatggttcataatatccaggggggtagaggatgatattacccacaatatcatagaaggtgcacacccttttgtgatattgtccataaaatccagaaggggagaggatgatattacttccaatatcacagggggtgtgtagccccatatgatattgtttgtaatatcaaggtagggagaggatgctattccttacaatagctcaaggggtgtaaccttcttgtgatattgtttgtaatatccagaaggggagaagataatttttttattttaaaagtaaactttaatgtcaaaaatgcaaacttgagaagggcagaaagatcaaacagaaggctgccacttcacaattggagggttgcacagtggccgggcagaggcgctcctcactccccagacggtgaggcagccgggcagaggtgctcctcacttccgagatgttgcaggagccgggcagaggtgctcctcacttcccagaacagggggctgccgggcagaggtgctcctcactgcccagacggtttgcaggcctggcagaggcactcctcacttcccaaacggagcagcggcaagccagaggcgctccacacttcccagatggtggggcagccgggcagaggcgatcctcacttctcagagggtagggcggcccagcagaggcgctcctcacttcccacatggtggggcggcaggctagaggcgatcctcacttcccagacggtggtgtggccatgcagaggtgctcctcacttcccagatggtgtggccgccgagctgaggcactcctcacttccctgacagtggggcggctgggcagaggcgctcctcacttcccagacacttggactccgggcagagactctcctcatttcccagatggtggggctgccgggcagaggcgctcctcacttcccagacggttcagaggccgggcagaggcgctctggggagaggataatgttactcccaatatcgcagggggtgcacactccctgtgatattgttccgaatatccagagggggaaaggatgatatagctcccaaaatcgtggggagtgtacacccccctgtgatcttgtttgtaataccaagaagaaaagagaatgctattatttccaatatagcagggggagtacaaccccctgtgatattgttcgtaatatctagggggagagaaaattatattagtcttaatatctcaggggacgttcatccccctgtaatattgttggtaatattcagaatggagaagatgatattgttcttaaaatacaggaaaaaatatgataatattacttccaatatcgaagggggtgtacactctcctgtgatattgttcccaatatccagaatgaaagaggatgctattactcccaatatcccagggagtgtacacccctttgccatattgttcataatatccaggggaagacaggataacattactcccaatatcaccgggggtgtccacccactagtgatatttattgttcatcatatccagaaaaggagaggatgatattactcccaatattgcaggtggtgtacggtccctgtgatattctttgaaatatctagaaaaggagaggatgatatcactccgagtatcacagggggtgtacacccccctgtgatattgttcgtaatatccaggggagaaaaggatgatataattgccaatatttcaggggatgtgcacctccctgtgatattgtttgtaatatccaggggtggagaggatgatattactcaaaataacgtaaacatcctgtgtgtacatcccctgtgatattgtttataatatccaggggggtagaagatgacattacccccaatatcacagagtgtacacacccctgggatactgttcataatatccaggcgggaaagaatgaactacttccaatatcgcaggatatgtacacccccctgtgatatatttcctaatatttatgtgggtaaggatattacccccaatatcacagaaggtgtacatcctctttgtgatattattcctaacatccaggaaaggagagaatgatattactcccagtatcgcagggggtgtacaccacccctgtgatattgttgctaatatccagggggagaggataatattactcccaaaatcacaggggacgtacactcctcctgagatattgttcctaatattcatggggaaaagaatgctactactccaaatacagcagagggtgtacaccatccccgtgatattgttttttatatccaaagggtgaaaggctgatattactcccaatatcgcagggggtgtacaggccccccatgatatcattcttaatatccagggaggcaaagaatgatgttactcccaatattgcaggctgtatacaccccccgtgatattgttcctaatatccagagtaagagaggatgacattgctcccaatattgcaggggttgcacgcacgccctgtgataatattactcccaatatcaacagtgggtgtacactcctcctgtgatattgtttgttatatctaagaaagaagaggatgatattactgtcaatatcacagaaggtgtacagccccttgtgatgttgtttctaatatccagcggtgagaggatggtattactcgcaatattgtagggggtgtccaacggccctgtgatattgtttctcatattcaaaaaggaaaagaataatataactccaaatatcgcagggtgtgtacacttccctgtgatattgatcctaatatccaggaagagagaggatgatattaatcccaatatcacagggggtgtacatcgcttctgtgatattcttcctaatatccagggggggaggggatgctattactcttaaaatcgcagggaacttacactcccactatgatatttttcctaatatccaggaagggagaaaatgatattactcctaatatcacatatcacaatgggtgtacatctccccgtgatattgtttctaatatcaaggatgggagaaaattatattactctcaatatcgcagggggtgtgcacacctcctgtgatattgttcctagtatccagcggaggagatgatattactttaaatattgtagaaggtgtacaacccccctttgatattgttcctaatatccagggggaaaggagatgatattactcctaatatcgcaggggctgtacaaccctatgtgatattgtttcttctaatatccaggggtggagaagataatattactcctaaaatcgaaggggacatacactccccctgtgatatttttcctaatatccagaaggaaagaggatgatattactcctaatattacaagaaatgtatacctgtcctgtgatattgttcctaatatccagaggggtaaatgattatattactcccaatatcgcaggggtgtacaccttccctgagatattgtttctaatatgcagtggaggagaggatggtattactcccaacatcacaggagatgtaaactccccttgtgatattcttcctaatgttcaggacgaaggagggtaatattactcactgtattgcagcagggggtgtagagccccctgtgatattgtttttaatattcaaggttggagaaaataatattccttccaatatcgcatggggtgtacacccttctttttatatagtttctaatatctggggggagaggatgatattactcccaatatcgcagggggattacacccccactgtgatattgtttttaatatccagggtgggagaggataatattactccaaatatcccagggctatacaccctccgtgtgatattgtttctaatatccagaggaagagaagatgatattactcccaatgtcacagggtgtgtacaggccttctttgatattgttcttaatatccatgagggagaggatgatattactcccaatatcgcaaagactgtacaccctttctgtgatattgcttccaatatccagggagggagaggatattacactcaggatcacagggggtgtacaccccaacctgtgatattgtttctaatatctagggaaaatgagggtgatattactatcaatatcacaggaggtgtacactcccttatgatattgttcctaatatccaggagaatgacaggataatattactcccaatatcgcgggtggtgtctccccccactccgtgatattgttcctaatacccagagggggagagaatcatattactcccaatatcgcaggggatgtacacctacatccggcggagtagaagataatattactcacaatatcgcaagaagtgttcaccttccctgttatattgttgctaatatccagggagtgagaagatgatattactttcaatactgagcgtgtacactacccctgtgatattgtttctcatatccagtagaggagaaaatcatgttactcccaatattgcaggggtgaacacctcctttgtgatatttttcctaatatcaggaaagggagagtatgatattacccttaatattgacaggggtgtacacccccctttgatattgttccaatatccaggggggcagaggataatattattcccaatatcgcagagggtgtacaccccccgtgatattgttcctaatatccagagaaataaaaaatagtattatttccaatatcacagggcgtacattttccctgtaattttgttcctaatatctggggggtggggtggcaggataatattactctcaatattggagagggtgtacacccccctgtgatattgttcctaatattcagggtgggagagaatgatgttactcccaatatctcaggagtcgtatacacccccttgtgatattttttctaatatccaggaggcagaggatgatattgctcccaatatcgcagggggtatacacccgagctgtgatattgtttctaatatgcaatatgggggaaggatgattttactttcaatatcgcagggaatgtacactttccttgtgattttgttcctaatatccaggggtggagaagatgctattactatattactcctcatatcgcaggcggtgtacaactccctgtgatatggttcagaatatccagagtgaaaaaggagggtgacattactcccaatatcgggggggtgtacacccctttgtgatgtggttggtaatatccaggggggcagatgagggtgatatcactccccatatcgtggaaggcgtccacttttttgtgatgtggttctttatatcccgaggggagaaggtgatattactccccatatcgcgaagggcatacacccccctgtgatatagctcataatattccggagagtggaggaagatactatgccctatatcgcgggtggcctacaaccccctatggtttggcttataatatccaggggggagagggtaatattgctccccatattgtggagacgtacagccccctgtgatatggtttgtaatatctttggggggcgagggtgatattactccccatatcgcggggagcatacacccccgtgatctggttcatagtatctcaaaggaagaagttgatgtgtacaacttaagggaaaaagttgaagtgaagtgtacacacgccctgtgacgtggttcataatatccaggcgggggagaggagagtgatatttactccccatatcgcgggtgttgtaaactcccctgtgatatagttcataatatccaggggagagaggagggtgatattgctcctcatatcgcgaagggtgtacaaccccctgtgatatggttcataatatccagaagggtagaggacgatgatattactccacatatcttgggaggtgtgatatggttcgtaatatccagcgatgagagaatgatattactccccatatcgcaaaaggtgtgatagggtttgtaatatcctgagggggagagggtgatattaatccctatattgcagaaggactacaccctcccatgacatggtttgtaatatcccagggggtagagtgtgatattactttccatatcacagggggtgtgatatgattcgtaatattcgaagggggagagggtgacactactctccatatcacggggtgtgtgatatggttcttaatatcccaggggttagaggttgatattaccccctttttggggggtgtgtacaccccctgtgatatggttcgtaatatcccgggggagacagggtgacattattccccatatcgaggggatcgtacaccccctgtggtgtggttcataatatccctagggggagatggtgatattactccccatatcagggggcgtgcactcttctgtggtataattagtaatatccagggggcagaggtcgatattcgtttccatatcatgaagggagtacacttccctgtgatatggttcctaatatccaggggggagagggtgatattattccccatattgcggggggacatacaacccctgtgatatggttcataataaccagaaaagaagagggtgatattaatccccgtattgcagagggcatacaccccccctgtgatatggtttgtaatatctaggggaggaaaaggtgatattactttccatattgctgggtgcagacacccctttatgatatggttcataatatccaagttggagagggtgatattacttcccatatcatgggaggtatacccttccctgtgatatggttcgtaatatccagaaggggagagattgatattactccccatattgtggggggcgtacaccttcctgtgatacggtttgtaatatctaggggatatagtgggtgatattactcaccatatcacgggggttgtaacatggtttgtaatatccaggggaggagagggtaatgttactccccatatctcggggcatgtacaccctcctgtgacatggttcgtaatatccaggtcgggagagggtgatattactcctcatattgccgggggtgtgttatggttcataatatcctggggaaggaggctgctatcactctccacatcttgggggatgtacactctcctgtgatatggttcataatatccagggtgggtgagggtaatattactccccatatcgcgggaagtgtacatacccctgtaatattgtttgtaatagaagagagggtgatattactccccacatcgcgggtggtgcccacccccctgtgatatggtttggaatatccagggggatgaggagggtgatattactccccatatctcggtgggagtacatccctctttgatcaagttcataatatccaaaaggaaacaggagagtgatattactccccatatcgccgggggtgtacacgggagggggagtacacccccggcgatatggtctgtaatatccagggaaggagaggagggtgatattactcaccatatcgcaggtggtctacatttacctgtgaaacagtttgtaatatccagggggggaaatgagaatgattttttttttttgagtctcactgtgtcacccaggttggagtgcagtggcacgatcttggctcactgcaacccccgcctcctggactcaagcaattctcctctcccagcctcctgaatagctgggactacaggcgcaccccacaacgtctggctaatttttgtatttttattagagacggggtttcaccatattggccaggctgatctcgaactcctgaccctgtgatccatccgcctcggcctccaaaagtgctgagattacagatgtgagccaccacgcatggcccaaggagaacgatattactccccatatcccagggggtgtatatccccctgtgatatggttcagaatatccggaaggaaagacagggatattacttcccatatcgcaaggggtgtgacatggttcgtaatatcccatgggggagagggtaatattactcttcgtattgtgaagggcatacactcccctgtgatacagttcataatattccggggagtagaggaagatattatgctccatatcgcgggtggcataagccccctgtggtttggttcataatatccagggaggagagggtaatattactccccatattgtggggacgtacaccctcctgtgatatggtttgtaatatcccagaggggagagagtgatattactccccatattgcagggacatacacccccctgtgatatggttcaaaatgtcttttttttttgaaggactggttctttatttcaaaaagacacttgtcaatattcattatcaaaacagttgcactattgatttctctttctcccaatcggccccaagtagaccacatcaaaggagagtacatattaagccaataagctgtaggatgtacacctaacagacctcctagaaaccttaccagaaaatggggacagggtagggaaagaaactttaaaagatcaacaaactgccagcccacggactgcaggggctgtcacagccagatggggtggccagggtgccacaaacccaaagaagcaaagtttcaaaataatataaaatttaaaaagttttgtacataagctattcaagatttctccagcactgactgatacaaagcacaatgagatggcacttgtagagacagcagcttcaaactcagaaaagggtaatgagatgagtttcacatggctaaatcagtggcaaaaacacaatcttctttctttctttctttctttcaaggaggcaagaaaagcaattaagtgctcacctcaacataaggggaacatgatccattctgtaagcagttgggagggggtagagatggaacaaaattttggtctcagaggtcttgccatcttaatttggtcacttctaatgaaaaaaataaaaaatagaaataacattatccaaaggtatcttaaagctgaaaacttgaacagcacattttttgttgttgttgtttggctaactcctcctggaaccacctttctggcttagctagtactttgtacagagcaatgaggcttcccatagtggagtctccctgggctctgtttggctctcagcaaggcaggcctataccttttcctctcctccatggagagaggaatatgcattaaggtgaaaaatcaccttccaaaagtgagaaagggattcgatcgctgcttcagggctgtggtattatatggaatgttttacaaaaggttgctacaaaacaacaaaagaggtaattacaaaatgtgtacatcacaacatactttttaaagacattatgcattgtgctcacattcccttaaatgttgtttccaaaggtgctcagcctctagcccagctggaatctccgggaagaggcggacagtttggtgaaaaagacacagggaaggagcgggcggcggaaggagggggcggcgaaaggagaaagcagccttccagttaaagatcagccctcaattaaaggtcagcttcgggcaggctggcctcaggcggagtctggttcagagggaggagcagcagcagggtgagactgaggcgttctacatctcattcaggtcaagcagagtctggtccagcatcctttgtgtacagaggtgctcccctttggtgcatttcagtttatcttccaagtcatcaattgtcttttccagcttggctaccgatctctcagcaaactcagcatgggtctccgcctcctttattttatcagtaagaatcttgatctcttcctcatatttgtcttctttttgagagtacttttcttcagcagcactcagacacttcaggttctggtccatcagtctaatctgctcatccatctctcggcaaagggattctgccagctcagctcgttcctctgtgcgttccaagtctccttcaatgatcaccaacttacgagccacctcttcatacttcctatctgcctcttctgcaatgtgcttagcttctctgagttggatttcctggagttccatcttttcttcatcttttaaggcccggttttcaataaccttcttacctctctcactctcatcagcagctttttccgcttcttccagcttttgcagggcagtagccaggtgctcctgagcacggtccagctcctcttcaaccagctggatcccacgttcaaggaggccacctcagcctcagcctgttcccgggcccacctttctccctcaacttctcgctggaggcgctcagctcgctcctctgcatcatctgcctgctgctgcagaacctggatcttgcgcttcaccgcctcgatggtggtgatcccagccatggtgcccacccagctactgctagagctccggttcctgcctcctccgatcggcgttgcagcctcctctcacccttacttccgcctcggttcaaaatatcttaagggaaggagttgatattactccccacatcacgggaagtttacatcccctggtgatatggtttgtaatatcccagggtggatagggtgatattactctccatatcgcgaaggagtactcccccctgtgatatggttcataatatccttggggggagagtgtgatattactccccatatcgcgagggccatatactcctttgtgacatggttcgaaatatcccggtgggggagggggtagagggtaatattactccccatacagcgaagagcatacgcccttctgtggcaaggttagtaatacttcagggaaaagagtgcaatattacttttcatattgcagggaacatacactcccctgtgacatggttcgtaatatcccgggggctgagagggtgatatttctccccatatcaccgggggcctacacctgggtgtgatatggctcataatatacagggagggagagggtgatattactccacataccgagtgaggggttacacaccctcgtgacatgttcgaaataccccaaggaggagacaatgatattactttccctgtcgcgggggctacaccctcccagtgatatggttcacaatatcccggggtggagagggtgatattactccctatatcaccggggggtgtacacttccctgggaaatggtttacagtatccccggggggagagggtactattactccccatatcacgttacatatcagggtacacccccacgtgatatggtttgtaacatcccaggaggaagaaaatgatattactccccatatcgcggtggcatacacccctccccgttaaatggttcataatatcttggggtggagagggtgatattactccccatatcacgtggggcatacaccccactatgatatggttcataatatcccggaggggagagggagatattactctccatgtcgcggggggcatatacacccctgtgatatggtttgtgatatcccgggggcggagagggagatattactctccatatcgtggggtcgtacacttttctgtgatatgattcgtaatatccagacggggagagggtgatattacttcccatattgcgggggcgtacacccctctgtgatatggttcataatatcccgaagaaaagagggtgatattactcctcatatcgcggggaacacacaccaccctgtgatatggtttgtaatattcagcgggggagagagtaatattactccctgtatctcggatggcgtacactcccctgtgatatggttcataatatccagaagaaaagagggtgatattactccccatattccagggaatgtacaccaccctttgaatatggttcgtaatatccaggaggggagagggtaatattgctcccaatatcgaaggaggtgttatacggttagtaatatccagagaaggagagggtgacattactccccacatcgtggtgggtgtgcacccacctgtgatatggttcataatattcaggttaagagaggtgatattgctttccatatcgccaagggtgtacactcccgtgaaatacagttcgtaatatccaaaaggggagagggtgatattactcccatatcgtggggggtgtacacccctctgtgatatggttcataatatccagggtggaataaggtggtattactccctgtatctcggggcatgtacatcgcctgtgatatgattcataatatccagaagaagagagggtgatattaatctccatattgctgggggtgtacaaccccctgttgtatggtttgttacactgagttggggagagggttacattactctcaatatcgagtggggcatacacacttatgtgatatggttcataatatcccagggaggagagggtgatattactccccatatcgcgggaggcatacaccccaatgtgatatggtttgtaatatctacatttttttttttgagacgaagtctcgctcttgtcccccaggctggagtatgatggccggatctcggctcactgcaacctcagcctcccgggttcaagcgattctcctgccttggtcccccaagaagttgggattacaggcgcacaccaccacgcccggctactttttgtatttttagtagagaaggggtttcaccatgttggccaggctggtctagaactcctgacctcagatgatccacctgcctcggcctcccaaagtgctgggattacaggcgtgagccactgcacctggcctggtttgtaatatctatgaagggggaaggtgatattactttccatatcacgggaggcgtacaccacgatgtgatatggtttgtaatatccagggggtatactgggtgatattactccccatatcgcggggagtgtatacccttttgtgatatggttcctaatattaagctgaggagaaggtaatattactccccatatcgcaggggtttttatatggttcataatattcaggaagagagagggtgacattactctccatatcacggggtgtgtactcccccatgtgatatggtttgtaatatccagggaaggagaggttaatattactccccatatcgcagggggtgtacacctctctgtggtttgtaatatccaaagggaagaggatgatattatcttcaatatcttggggggatacagtccccagtgatattgttcataatatccagagggggaggggatgatattactcccaatattgcaggtggtgtacaaccccctgtgatattctttataatatagagggggatgatgatattactcccaatatagtaaacaacctgtgtgtacaccccctgtgatattgtttataatatccaagggtggaaaggatgatattactcctcatatcgcagggggtgtatacccctctgtgacattgttcctaatattcaggggaggagaagatgatactactcctcatatcacaggggatgtacacccccctgtgatacttttggtaatatccaggggaggagaaaattatattattccccatgtcacagagggtgtacaccccgctgtgatagtgttcataatatccaggtgaaaagaggatgatattactccgaatatctcaggaagtgtacacccttctgtgatattgttcataatatccaaaggtggagaggaggatactactccccatatcgcagtgggtgtacacccccctgtgatatggttcataatatccaatgtaggagaggatgatattactttccatatcgcggagagtgtacatccccctgttatattgtttgtaatattcagggagaaagaggatactactactccccatatcacacggggtgtatattcccctgtgatatggttcctgatatccaagagatattataatcctctcttggattatgctacctctcatatcgcatggggtgtacacacactttgtgatatcgtttgtcatatccaaggagggagaggattatattaatcccaagatcacggggggtgtacaccctcctgtgatattgtttgtaatattaaggggggagaggataatattactcccaatataattaacaccctgtgtgtactcctccttgtaatattgttcataatatccaatgggggagacgatgatattactttcaatatcgcagaggatgtacatccctttgtaacaatgtttgtaatataaaaggcaagagaggatgatactacttccaaaattgcaggacatgtacaccccccggtgatattgttcctaatatccagtggggaagaggatgatagtagtcccaatatcgcaaagggtgtacacaccccctgggatattgttcctaatataaaaggaggagaggatgctattattcccaatatcacagaaggtgtaaaatcccctgtgatattgttcgtaatattcaggaggggagaggattatattactcccaatatcacagggtgtgtacacagggaggggcaagggccagaagcgggcgggaatccccatgtttgggcggacccagtttctaatggccagcatttgccaatcaaagcttaccagagaactctaaaagccagggctttcctgctagacaagactcatttctggaactgctttaaaaagaaacaaaacttcccaaggaccccttttcctctctgtctgcctaaaataatgttttaaaaactcctaaagcagctgaattcagcccccttcctgggggaatgtatagacggaactcccacctttcccggcatcccaaggccagagtatgtgaaactcctgggtctctatgtgtgtctgagcggctgctctgccaacactccacacagccctgtgtcctggacccaaggcccttatgacctgagctcaagaggggatctcctgatccatgggttgcaaagatccatgggagaagcatggtttctggggcggggtcacacgctcagtcactgtttccctcggatgccggagatggttcctttggctctctgccaatacagggtgaatcatcatccatccctcttttctttgttctcccgggtcaagttgtttgcctagtcagtcccaatgtgagaacctgaatatttcagttgacgcgctgacttcaaaatccccgggcttcgggaggcggagcttgcagtgagccgagatcccgccactgcactccagcctgggcgacagagcgagactccgtctcaaaaaaaaaaaaaaaaaaaaaaaaaaaaaagtccccgggcttttcttttcactcagtggaaggcagctgcttctaattggccatcttggcccgcccccaccacgtgaccttctgtaaaatgcctccactctccaggaacgctctcattatataactttgcctgaaaccaacagcacgctcattgcacatatcatgggctcatttatttcacttataaagaacctggccaaggaagagatagtgcctaaagtggccagtattctgaccgatatgttagaaaaatggtgtgccgaccaattcatgacatgtgtcccaaaactagcaacggaaattgtattcgccgtgttgaggtctctaatccagatgatgctcatctatgtactggaaaaggcagagtcctttcctgacaagctgctgaaactcttcagaaacatctcatatttcctgaagaagatgatgtctggacaagcagcacaggtcgttcagatttaactttctattcatatatccagcacgatattcgcacaattgtcacgaaaccttaccagttgatgagtcctgcacatttcctttaatttcaggaggaagagggtaatccggatgagttttctgacctactctgctgctgtgattaaacaaccaccaggaaattttgacgacactgttctcctgagctcctccctttcctccgggaacaaaacaattgaatttacaaaaataaagtgttatttgactggagtgaggtctcatgtctgcttatgcggtggctcgctgctcagaacagggtgagtctctgggttgtgtgctgaggaggggaggctctcaatctggagaaaacccactgcaggggacacctccatggggtctgagggactgaggatgaggagccggactgggtctagggaaggaggaggtttcagagggtgaaattctggcactaaagcctgggggtgtttgggaacttcctccttccgaagaagtttcagggagggataaagacaaaccctgggctccttgaggggcccttactaatttgagaggactctatcgggaaggagagtgacaatggcctccttgaggactgaggcccctgaataaatgaggcccagatacagtccatgggggatgagaccttcaagggtcacattttggttgggacagaggaaaagtgcagctctgcagccgcagaggaaaacccggcagtgtgaaagcgaccttggaggggccctgtgcgctctgaatgcgtctgagcccccatcccctgtccccgcctctctttctggattcttccagctcggctgtctccgccatcttctgagcgctccaccctgacttattcaagtttcccttctgccttccaagtactccaaaatctttcagatctgtgtccctacccctgtttttagcatgtgttggggctccaggtccctgaaggtttctggcctgaaatccacctccccagcggagtggactgcgttctagagactccacactccgcgaggttcccaggcccctgagggacaaccgagtggcctgcgcacttcagggctccacactcggcaaggtctttcaagcccttggggtccccttcttagttttttccacctttctgggctgcagtcactccataaatgctgggatctgatccccacccccactctcgtttcctcaattctgcgggctacacgctctggcaaggtcctccgggccctggatcccctccctctccctatgcccacgctcctagtcagcccttctggggtccactattttcaggaactaaccgttctcatggagccttgctaaccggaaagctgtgtggaagaaaggctttgaggatagaggtggagatttggctcttccatagtgccactcacccaccccaccatgctgccactgccagacccggacccctgtttcagaacaagtgaccagattcgctcctggacagccctggacactggccttttctctgaaaactactcaccctttctctagtccccacttcatgccagcctcataccctcttccttcccccacgctggcttccgggatcctcctctgctcagacaacctcttctgtgtcccacccccgtttttagaatgctttggggcaccaggttgggggaaggtttctggcctgatatccatctctttccaaactcccttcttcccttgaaaggcttcttgccttcagccccacttctggctccgaggtttcaggacaccctcctcttcatcctcattcttttgaccaccagctttttaggaattcgaacgtccctctcatcttcgtgaatcctgtccaggcatttgttgaccccttcatctgatacccctgacctcacattgccaaaagtctacccctacccagtacactggaattagacaaaatcccaggagttttacctcaactctgagtgtgcccacaggagctctccctgaagccacgtccttttaagcagggtctagggttcctcccttgtcttaatgaactctttgtcacacggaggacgttatggagcccttatgatctttcactgcctttctgcccagcgttttgtctttccatggacatttataatattttccatggacattttgttctctcaatgtccacccctaatttccaacatcccaaagattctcatgtgtttcctgaaagccatttacaggaatggctgtgcccagacccccttccccaggatcctccttcacacctggtaggtgcctctcctagagagatttgcactcagttgtcgtgcagtcacatggcccagatggttgttaatcacccccttcctggcaacagctagcagccagggaatcactggcacagaaacctcagggtgaccaagatgaggccacctctgtgctgaaggctgtgctccagagcctgcttgggatcaggcttaagcaggtcttcagccagacctgatgttacctggtttccttgagctgccctgcctgagctatcgggagcactccctcaatgcacatcttgattccctatctcatgctctgcttctagaaaccatgagctatcaattgctactggcaatggtcctgggaagtcaaccctaagtatggattctggggttggatgactccccacaggacttcagtgagcaacaatcactgctggcagttggaggacagagtcgctagggcatgtgaccactgtgaaaccaccgatgtttcacctggggtaattttggatgaactacggtagaagcactgaaggtacattgcttttggtttggaagattgtaggtaaataatagcgatatgaatgtggaattggatggctgcaaacgagtgccattgatgcattgaaagaggaaaagtcaggctgtcacctgtcactcagcaatttaaagtgtgagagttgggactagatgtggtggctcacatctataatccagagattcgggggaagcttgaagaggtaggatcttttgagtccaggagttccagaccagcctggacaccagagcaagacctcatctctacaacaaaattttcttaaaaattagatgggcttggtggcacgcacctgtacttgtagatctagctaatggggagcatgagataaaaaaatcacctgagtcagggacttaggggttacaatgaggtatgattgtgccagtgcacacactcccacctggccaacagagtgagattctgcttccaaaaaaataagaaataaatcaggtttgagagttggaaagcatcatcttctcctagagccaaaggacatgtacaactgagacccaggaacaaagcttcatcacaaagagaccatcatcagtggagccgggagatgcattccccctcaccctgccttgaggaggcagtggagtcatctgtctgggatcctttctgacccagccctatttgtttgtctctttggcttctttggatttgtatattttagctgttataacactgtaaaacaaacagagtgatttttttgagttgtgtgaatgatgctagctccatagtcaccctgagagtgatgggaacttttgaatttgtggcaagttggagggtagtgtaagtgacctgagattgccaaattggggctagcactggatgtgaggttaggctagtggaaaaatatgcccagaaccagaggagtgtgggctcactgcaggtggttaggctcagatccaaattgtacagatggatagctttggggtaaagaataacatagttgagaagtgcatgtgttagtctgttcatgcactgctataaagaattacctgagactgggtaattatttataaaactcaggtttaattgggtcatggttccacaggctgtacaaaaagtatgatgctggccatcagctcaacttctggggaggccccagaatagttagagtcatggcaaaaagtacaagggaagcaggctcatcttccacggccagagctggagcaagtggtaggagaggtgatacacactttcaaacaagtaggtcttttgagaactccatcaccggacagcacctatgggatggtgctaaattattcatgaaatatccgcctccataatccactcaactgtcaccagcgcagccagccccacctccaacagtggggattacaattccatatgaggtgtgggtggggacacagctccaacctcaatcagtgggcatcctggattgggtctactatagaaggagaaccaggagctgactatgatcttgaaccctacccatgatggccgggcggggtgactcatgcctgtaaccccagcactttgggaggctgaggtgggtggatcgcctgaagtcaggagttagagaccagcctggccaacatggtgaaaacctgtctctactaaaaatacaaaaaattagaccggcgttgtgctggatgcctgtaatcacaccactacgctccagcatgggaaaaaataccaaaacttcgtctcaaaaaaaaaaaaaaaaaaaaaaaaaaaaagactgcccatgaccactgcaccagtgagagggacaccagcatcactgagatgcaagggctggacattcttcataggtcagagctcaaagcaggggacactgatacagagatgggctccatccatagcaccaaagtggtgagaggatgtgggaatggcagaggccagcactttgccatcaatgcaagggggtataaggaggtgacaccagtgccagagtacatcacggggggactgccctacaatatctaggacttacctcttagagcgtgtttcattagcgacaacagatataaatggcagacaggtgtgtccctgcattaacaggaaatagaaatcatcaagaggaacagaaggcagatgtcagcagccccttagaaagtcatcatccttcatacagttaaaatctgagacagttctcacacgagaaggcctaactcaaaaagaggctgggttctcatgaggcaggtttatgcaaaaccaaggaaggtgtacaagtttggaattctccagtttcccttggaaaagacctacagtcatttgcttaggtaactgagcactgaacaaaggtgagtattgttgtcttttagaagctcttggccaagaaggccttgttggcataaaacccatggtttggaaacatcaccatgacccctgttagagtaatggcctaagggtgggggtcaggaaattgatgtattccttgccaacttctgcctctaagtgagtgaactctgtttgtgaacctctctcctctgtggttatgttcctaggctctcatgtataatcaggagtcatagacttagaaacaggaaaaatacttacagtgtttttgtggcctgtgagctatgacttataattttaggaaaaaaacaattgcaaatggaaagcctaagtctatcaatgctcatccaagacaacataatcaataaaaaccaatatcaaatctcaaggcaaattatttcctgtatatagatggcagagatgagcaccaccatcaaaaactcaaggaccagtgctgtgggtccagtcatctgtttcatggaattcaccagtctggtatcttcaaaatccagaaggatgatggcagatggcaggaaagtaatgcaaacgtcatcaggtgtgaccccactgtagcagctgtgatggatgttttctctcaccatagcaataaataacacaacctcggtcacactgtatgcattgttggtctgcaaaatccatgttttgcaaaactcttcaggaaggtggatctgtaatattggcattgacatgagaacaacagcagtatttattcacaatctcaagctctctgtcttcccgtctctctcattagccatccaagtagtcctgaggaaccaagcccatcagaacattctgcaacataatacacagctccattctccattcaaattttgttgttgttgttgttgttgatgagacaacatcttactccatcagccaggctgacgtacagtggggctatctgggctgactgtagtcttgagcttccaggctcaaggcatcctctcacctcagcctcctaagtggcttgaactacagacacacagcgacatgctgggctagtttttgtatattttgtagagacgtgctctcaccatgttattcaggctggactcaaactcctgagcgtaagtgatccaagcaccttggcctcaaagtgctgagattacaagcctgagccactgcacccagcccaatctccattctactgataacaatgtcattaccaggtctgatggacaggaaatggtaaggtttctgaaaacctaaggatcacacagcgagttccaaaggctgaaagtgcatacctgtcgacactgataccaatgacatccaatggtgagaatgacattccttgtagtcctagctctgctcataacaaatctatactgaagtgtaagagtttgatggtcatggggattttccatgtctctgcctttcagcgatgtgccatatctgtgaagtgttcagaaatgcaacagcctgaggcatgctgggcatatcctctaataaaaaggaaaatgccattttatggtcctgtatttctacaagttggaacacatgggcctgtgatccagatgggggaaatgggaatattcccactcattcaccttcatccacgaagcccatttgaaagctttgggcttcccatccttgtagattttagtgttgtgggctgggtgcagtggctttcacctgtactgccaacactttgggaggcctagacaggtgaatccactgaggccaaaagttcgagaccagcctggccaagatggtgaaaccccgtccctactaaaaatacaaaaattagcaaggtattggggccagcacctgtaatcccagctgctcgggaggctgaggctggagaatcgcttgaacccaaaaggcagagactgcagtgacccgatcctgcctttgcactccacctgggcaagcagaacaaaacttctgtcttgaaaaaaaaaacaaaaaacgaacaaaaaagatgttagagttctgggtttagaggtctataccccagaaagagaatggtttcaacaagggacaaagaagttgctttaaacgttgacttgccatttcttttcagtgtgtttgttctcttgcgtcaagagaccaccagaaaagtggtgcaattactctcctgtcaagaatcattgactatcatctgcaagagggtcagatcctggtatataattagggcagaaatacttagtctgagaagggtatgacatccagaggccctattaatgatgtccttttctccatgcctgactctgaccccatgtgctggactgcccctgtgtggatggcctcatggcctgctcggactctgaggtcccaccccaagtggcacctccatggagggctctactcttgtatgggctctgacactcacactgagacactctcccatggacacctcttcacccacttggggtctgaaactgggctactccatccctccctaacctggaacagagagctttcactgctattacacaagtcatagaggctaactcctcatttttccaagctaattattgaaacattagtcctgggttgataagacaagataagttaacttttcataaatttgcttatcaagttttgaataaattcaaataaattcaccttccccacacaccttagttgtcgacatcacacgcgcacccatactcacagggtgagcacgaaggcttcactgtcagtggagaaagtggcaaaacccttctgtgcctcatcctggtctagacctggccctcatcctttcccactcttcccctcactcccttggattcatccacactggcctcctgcctgctgctccacctccctgcgaagctcacccctgcctcagggcctttgcacgtgcagtggcttcaagccatatcctcttcacccagatctcccagatctcctgaatgatcttcttttatcattcaggtctcagcttgcatgtaatcttctcagtgaggattacccaaaccacatagttcattcattcattcaaatattcattcaatggcatattgacaaagcagctacttcatgccaggccttgggccaggtgttatggatatggcaacaaacaaaacaagagttttctgctctcaaatttttacccacttaaaggagatatcatacatcatctgtaaataaatacatcatctgtaaataatgatgtaaataaatacatcatctgtaaatctgtaaataatgatgtaaataaatacatcatctgtaaataaataaagtataataaaagaaaatagtaggtttttttggttggaggtgaccgtgaagtttgcaaataccatcttacaacacattattttattttatttcatttcatttttaattttattattattatactttaagttttagggtacatgtgcacaacgtgcagatttgttacatatgtatacatgtgtgaagttggtgtgctgcacccattaactcgtcatttagcattaggtatatctcctaatgctatccttcccccctcccccaccccacaacagtccccggtgtgtgatgttccccttcctgtgtccatgtgttctcattgttcagttcccccctatgagtgagaacatgcggtatttggttttttgtccttgtgatagtttgctgagaatgatggtttccagcttcatccatgtccctacaaaggacacgaactcatcattttttatggctgcatagtattccatggtgtatatgtgccacattttcttcatccagtctatcattgttggatatttgggttggttccaagtctttgctattgtgaagagtgccgcaataaacatacgtgtgcgtgtgtctttatagcagcatgatttataatcctttgggtatatacccagtaatgggatggctgggtcaaatggtatttctagctctagatcactgaggaatcgccacactgacttccacagtggttgaactagtttacagtcccaccaacagtgtaaaagtgttcctatttctccacatcctctccagcacctgttgtttcctgactttttaatgatcgccattctaactggtgtgagatggtatctcactgtggctttgatttgcatttctctgatggccagtgatgatgagcatttcttcatgtgttttttggctgcataaatgtcttcttttgagaaatgtctgttcatatccttcacccactttttgatggggttgtttgtttttttcttgtaaatttgtttgagttcattgtagattctggatattagccctttgtcagatgagtaggttgtgaaaattttctcccattctgcaggttacctgttcactctgatggtagtttcttttgctgtgcagaagctctttagtttaattagatcccatttgtcaattttggcttttgttgccattgcttttggtgttttagacatgaagtccttgcccgtgcctatgacctgaatggaaatgcctgggttttcttctagggtttttatggtttgaggtctaacatgtaagtctttaatccatcttgaattaatttttgtataaggtgtaaggaagggatccagtttcacctttctacatatggctagcctgttttcccagaaccatttattaaatagggaatcctttccccacttcttgtttttgtcaggtgtgtcaaagatcagatagttgtagatatgtgacattatttctgaggactctgttctgttgcattggtctatatctctgttttggtaccagtaccatgctgttttggttactgtagccttgtagtatagtttgaagtcaggtagcatgatgcctccagctttgctcttttggcttaggattgactttgcaatgcggggtcttttttggttccatgtgaactttaaagtagttttttccaattctgtgaagaaagtcattggtagcttgatggggatggcattgaatctataaattaccttgggcagtatggccattttcacgatattgattcttcctacccatgagcatggaatgttcttccatttgtttgtatcctcttttatttcattgagcagtggttttagttctccttgaagaggtccttcacatcccttgtaagttgggttcctaggtattttattccctttgaagcaattgtgaatgggagttcactcatgatttggctctctgtttgtctgttattggtgtataagaatgcttgtgatttttgtacattgattttgtatcctgagactttgctgaagttgcttatcagcttaaggagattttgggctgagacaatgggttttctagatatacaatcatgtcgtctgcaaacagggacaatttgacttcctcttttcctaattgaataccctttatttccttctcctgcctaattgccctggccagaacttccaacactatgttgaataggagtggtgagagagggcatccctgtcttgtgccagttttcaaagggaatgcttccagtttttgcccattcagtatgatattggctgtgggtttgtcatagatagctcttattattttgagatatgtcccatcaatacctaattattgagagttttcagcatgaagggttgttgaattttgtcaaaggccttttctgcatctattgagataatcatgtggtttttgtctttgggtctgtttatatgctggattacatttattgatttgcatatattgaaccagccttgcatcccagggatgaagcccacttgatcatggtggataagctttttgatgtgctgctggattcggtttgccagtattttactgaggacttttgcatcaatgttcatcaaggatattggtctaaaattctcttttttggttgtgtctctgcctggctttggtatcaggatgatgctggcctcataaaatgagttagggaggattccctctttttctattgattggaatagtttcaggaggaatggtaccagttcctccttgtacctctggtagaattgggctgtgaatccatctggtcctggactgtttttggttggtaagctattgattattgccacaatttcagatcctgttattgctctattcagagattcaacttcttcctggtttagtcttgggaaggtgtatgtgtccaggaatttatccatttcttctagattttctagtttatttgcgtagaggtgtttgtagtattctctgatggtagtttgtatttctgtgggatcagtggtgatatcacctttatcattttttattgcatctatttgattcttctctctttttttctttattagtcttgctaccggtctatcaattttgttgatccttttaaaaaaccagctcctggattcattaattttttgaagggttttttgtgtctctatttccttcagttctgctctgattttagttatttcttgccttctgctagcttttgaatgtgtttgctcttgcttttctagttcttttaattgtgatgttagggtgtcaattttggatctttcctgctttctcttgtgggcatttagtgttataaatttccctctacacactgctttgaatgtgtcccagagattgtggtatgttgtgtcttttttctcgttggtttcaaagaacatctttatttctgccttcattttgttatgtacccagtagtcattcaggagcaggttgttcagtttccatgtagttgagcggttttgagtgagtttcttaatcctgagttctagtttgattgcactgtggtctgagagacagtttgttataatttctgttcttttacatttgctgaggagagctttacttccaagtatgtggtcaattttggaataggtgtggtgtgatgctgaaaaaaatgtatattctgttgatttggggtggagagttctgtagatgtctattaggtccgcttggtgcagagctgagttcaaatcctgggtatccttgttaactttctgtctcattgatctgtctaatgttgacagtggggtgttaaagtctcccattattattgtgtgggagtctaagtctctttgtaggtcactcaggacttgctttatgaatctgggtgctcctgtattgggtgcatatatatttaggatagttagctcttcttgttgaattgatccctttaccattatgtaatggccttttttgtctcttacgatatttgttggtttaaagcctgttttatcagagactaggattgcaacacctgcctttttttgttttccattttcttggtagatcttcctccatccctttattttgagcttatgtgtgtctctgcacgtgagatgggtttcctgaatacagcacactgatgggtcttgactctttatccaatttgccagtctgtgtcttttaattggagcatttagcccatttacatttaaggttaatattgttatgtgtgaatttgatcctgtcgttatgatgttagctggttattttgctcattggttgatgcggtttcttcctagccttgatggtctttacaatttggcatgtttttgcagtggctggtactgactgttcctttccatgtttagcgcttccttcaggagctcttttagggcaggtctggtggtgacaaaatccctcagcatttgcttgtctgtaaaggattttatttctccttcacttatgaagcttagtttggctggatatgaaattctgggttgaaaattcttttctttaagaatgttgaatattggcccccactgtcttctggcttctagagtttctgccaagagatcagccgttagtctgatgggcttccctttgtgggtaacccgacctttctctctggctgcccttaacattttttccttcatttcaactttggtgaatctgacaattatgtgtcttggagttgctcttcttgaggagtatctttgtggcattctctgtatttcctgaatttgaatgttggcctgccttgctaggttgcagaagttctcctgggtaatatcctgaagagtgttttccagcttggttccattctccccatcactttcaggtacactaatcaaacgtagatttaatcttttcacatagttccatatttcttggaggctttgtttgtttctttttactctctttcctctaaacttctcttctcacttcatttcattaatttgatcttcattcacttatatactttcttccacttcatcaaatcggctactgaaggtattgcatgcatcatgtagttctcatgccatggttttcagctctatcaggtcatttaaggtcttctgtacattgttttctctacttagccattcgtctaatcttttttcaaggtttttagcttccttgtgatgggtttgaacatcccctttagctcagagatgtttgttattactgaccttctgaagcctgcttctgtcaacttgtcaaagtcattctccatccagctttgttccattgctggtgaggagctgcgatcctttggaggagaagaggtgctctggtttatagaattttcagcttttctgctctggtttctccccatctttgtggttttatctacctttggtctttgataatggtgacctagagatggggttttggtgtggatgtcctttttgttgatgttgatgctgttcctttctgtttgttagttttccttcgaacagtcaggttcctcagctgcaggtctgttggagtttgccggaggtccactccagaccctgtttgcctgggtatcaccagcggaggctgcagaatagcaaatattgcacaacagcaaatattgctgcctgatccttcctctggaagcttcgtctcaaaggggtgcctggctgtatgaggtgtcagttggcccctactgggaggtgtctcccagttaggctagatgggggttagggacccacttgagaaggcagcctgtccattcacagagctcaaacactatgctaggagagccactgctctcttcagtgctgtcagatggggatgtttaagtctgcagaaatttctgctgccttttattcagctatgccctgcccctacagatggagtctacagaggcaggcaggcctcattgagctgcggtgggctcctcccagttcgagcttccagaccactttgtttacctactgaagcctcagaaatggtgaacacccctcccccacccagtctgccgccttgcagttccatctcagactgctgtgctagcagtgagcgaggctccatgggcgtgggacccactgagccaggcacaggatataatctcctggtgtgccatttgctaagaccattggaaaagcacagtattaaggtgggagtgtcccaattttcccagtacagtctgtcacgggttccctcatctaggaaaggtaaatcccctaaccccttgtgcttcccggtgacgcaatgccccaccctgcttcagctagccctccatgggctgcatccactgtccaaccagcccaatgagatgaacaaggtacctcagttggaaatgcagaaatcacccatcttctgtgtggatcaggctgggagctgcagaccggagttgctcctattcggccatcttggaatggcaatctatgtttgctttttacatttgaaaaaactggtgtcacgtacctaggtattaatcattgtggtatcctcttgccgatttacctctttatcattaactagtgaccctccttgtcttttgttgttacagtctgtgattttagtctattttatctaatatgagaatagctactctggcacttttttggtttccagcttcatgaaatatccttttccatttccctgttttcatttccctttcggtgtctctatagatgaagttgatttctttaaggcaccataagttgggtcttatttctttatccatttgaccatttagagaatttagaacactgtcagtgttattattcataagtaaaaacttaagagtgggtgtagtggtgtacatctgtatttcctgcactttgagagactgaggcgagctgatctcctggggtcaggagtttgagaccggcctggtcaacatgatgaaaccctgtctctactaaaaatacaaaaattagccaagcatgctggcatgtgcctgtaatccaatttacttgggaggctgaggcaggagaagcttgaacctgggagacaaatgttgcagtgagctgagatcacacagagaagtcatctccactctcctcatcagaacctcttgttcacagcatttgtgagcacaaatcaatgatggttattctttcctactaattagggatattttattacacagcaatagcctccagcaaagggaaccatcatacatgattcctacaagttgacagggctggaattatcactgaaaaactaaggtggctatacttgattcccaatgtccaatttttcatgaatagagaaatttatcctttttccccccagccagaaaccaagttttgctcttacgcccaggctggaatcaagtggcacaatctcagctcactgcaacctctgccccccagcttcaagaaattcaccttttgaacaaggagatattaaggatacactatgtgtatgctaccggtggttgcaggagactcagaaaagagagaaacagtcactggcctcgtgcaactgatattctcgggaggagagaaaggcaatcaagaaagaaacatgctgtatttcagacagctgtaagtcctccacaagaaaagaaagcaggtgaggaacataggaaatgtgtcaaccataaggttcccgctaattctataagttggtcagggatatcctccaagaataagcagcatctgagcaatcacctgaagggaggaaggaaggaagactgtgagtggtggcttacacctgtaatcccagcactttgggaggccaaggagggcagattgcctgagctcaggagttcacgaccactcagagcaacctgttgatacccaatctctactaaaaacacacaaaaaaattacccgggtgtggtggcacgcacctgtagtcccagcttccatgcccagctgatttctctctctccatatatatatatatatacacatatattgtttttgcagagatagggtctcactgtgtcacccagtcatcaagcaattctcttatactgttttggaaaagcatgggaattacaggtgtgaaataccctgctggtcctgaaaaatgtgatatttgggattctctgcctggcttgttttacccaaaataatgacctccagttccttccaggttgctgcaaaagacatgattttcactgttttataactgaatagtattcctgtatgtatacataccacattttctttatttattcttctgttgattgacatgtagggtgattccatgtctttgctactgtaaataatgctgcagcaaatatttgtgtgcattttgatctattcctttgagtaggtacccagtactgcaactgcaggactgagtagttgttatattttttgttctttcagaaatctccatagtgtttgccataaaatctgcactaatttacattcccaacaacaatgcataagatttccccttttctccacattctcactaacatttgttatgtttttgtctttttcataatacccattctgactggagtaagatatctcattgtggtggttgttgatatttttgagacggggtctcactctgttgccagactggagtgcagtggtgtgatcgtggcttgctgcaacctccacctcccgggttcaagcaattctcctgcctcagcctcccgagtagctgggactacaggcgcgtgccaacaggcctggctcattttttgtatttttagtaaagacagggtttcaccatgttggccaggatgatcacagtctcttgagctcatcatacacctgcctcagcctcccaaagtgttggaattacagtcatgaggcagcgcacccaacctcaatgtggttttaatgaccatttctctgacgattcatggtgtggagaatttctttgaaataccttttggccatttatatgtgctcttttaaaaactgactcctgtccaggtgcggttgagcatgcctgtaaccccagaacttcgggaggctgaggccaatggatcacttgaggcaaagaggcagaaatcagcctggccaacaaggcaaaaccccatctttactaaaaatacaaaaaatcagccacgggctgtgactcgtgcctgtggtgcaagttactcaggaggttaaggcacaggaattgcttgaacccggtaggcacaggtcacagtgagccaagatcatggcactgcactacagcatgggtaatagagaaagacctgtctcataaaaacaaatgaataaataaataagataaaaaataaaaaagtctctttatgtcctttgccgactttttaatgggattctttggagttttctgttgtagttgagatctttgtttactctcggtattagtcttttgtcaaaggaaaagtttacaaataatttcttccgttctgcagtttgtctgctcactctgttgagaggattatttctttggctgtgcagcagctttttgtttcagtaaagcttttgaatttatataattaaaattttcagtttggtttaaatttgcactggtcgatttttggttttgttgcctgtacttttgaagtcatactcttgaactctttactagacaataaccagaagagttttctctagttttcttctcacatttttattatttcagtacatatatttaagtctataattcatcttcaattgatttttgtagaaatagtgagaaataggagtccaggtttattcttctgcaaatgacaattcaattgttccagcaccaattattgaaaagggtgtgctttcctcaacgtatattcttatcagctttgtcaaagatcagttggctataaatgtgtggctttctttctgggctctctagtctgttacatcaatctgtgtgtctatctgtatactactaccatgctgtattggtgatgatggctttgtaatataatttgaagtcaagaaatgtgatgctcccagctttgtttatttgcttcagaaaggctgagtcaacagctgcagagatgaagctgcccctcctcgcagggctccttcccggaaaaagatcatggctcccactgaccatataaccatggctggaactcctgaaattcccaaagggaggccctacccagtgaggggggatgaatgaaggtcctacttaaggaatctgtctggccacaatcaggcacagcagctgtgctgccttgtgggggaccagaccacctggattccctggagcctgcaggctagaatgtctgagtccatggaaacacagaaatggaggccgccctcacctccccagaaaactgtagtctcaggcagtctccagccgattgccactggttggctgctattccaagccagtgggtcttaacttgagaggtgctgtggaagtggggcccacggaatgaggctgcttggctccctggattcagccccttttctaagggaatgtacagatggaactcccgccttgcccagctttccaagtatataaaactcctgagtctctgtgagtgtctgagcgagtgctctggcaacattcgacacggctctgtgtatctgacccaagacccttatggcatgagctaatgggaggatcttctgatccatgcgtggcaaagatgcatgggagaaacatggtttgtgggtaggggttgtgcattcactactgcttctcttggctgtaggtgaaggtttctttggctctgtgctgatactgggtgcaccatcacccaccccctttgtttcttctcctgggtcaagtcatttgcctaatcagtcccaatgtaggaacctggatacttcagttcaaggtgctgaattcaccgtgcttttcattcaggggaagacagctgcttctcattgggcatcttggcctgcccacttcacgtcactttttgtaaaatccacaccactccaggaatatccattacttaacttcgcctgaaataaacagaaggctcattacacttatcatgggctcacttacttcgcctataatgaaggtgccatggaaatgctagtggatgacgtggtccattttcttagggatgagatagaaaaatggtgtatggctttttaatttaattaaaatttttagtttggtttaaatttacattggtctctttttggttttgttgcctgtacttttgaagtcttactcgtgaactctttactggacaatgaccagaagagttttccctaagtttcttctgatattttgaccatttcagtacatacatttcagtctataattcactttaaattgatttttgtaaacatggtaagaaataggagttcagatttattcttccgcatatgataatgcaactgtcccagtaccaattattgaaaagggtgtgctttccctagtgtatattcttgtcagctttgtcaaagatcagttgcctatgaatgtgtggctttcattttggattctctcgtctgttacatcaatctgtgtgtccacatttatacctgtaccatgctgtattggtgactatggctgtgtaatatattttagagttaggaaatgtgatgctcccagctttgttcatttgcttcagctgaaaaggttgagtccacaattacaaagatggcagccgcccatccccggaggacctccaacccagaaagagatcaggcttcccaccaaccctataaccctggctggagttcctgaaattccaacagggaggaccttcccagtgaggagggatgaatcaaggtcaaatttaaagaaacagtctggccactatcaggcacagcagcagtgctgccttgtgggggacccctcctgctccagaccagctgccctccctggagcccgaaggctagattgtctgagtctacggaaacagagacggtggccgccccaaccacccagaactcggtagtctcaggcacttggcttgctatcttgccactgcttggctggtattccaagcccgtgggacttgagaagtgctgtgatgatggggaccacaggatgaggctgtctggctccctgtgatatggctgtgatgagtggaggaacaccagggctcatgtctcacacagaattggagaaaatgacacaaacacatgtacagtggttttatggcgtgcagtttaataggcaagaacgaaggaagagctccccatactgagacagagggaggggggctccaaagccaaaagaggaaacccggagtgctgtggataccaatgagttatatgaagaaactggagggggcggtgtctgatttgcatagggttcaggcgattggttcgaccaggcatgtcatttatgtggcccacggaaaaactggccctcccacctagcctttgaatatgcacgtgccggacaccctgatttcctacactcatggggatatatgggggtggccatatcgccaggcacaggtggggacaagggccagaagagggcgggaatcgctatgtttgggtggacccagtttctaatggccggcatctgcagatcaaggttaccggagaactctaaaagccggggctttcctgctagacaagactcatttctggagctgctttaaaaagaaacaaaacttcccaaggaccccttttcctccctgtctgcccaaaataatttcttaacaactcgtataacacctgaattcagcccccttactgggggaatgtaccaacggaactcccacctttcctggtttctcaaggctagattgtgtaaacctcctgggtctcggtctgtgtctgagcagctgctctgccaacactccacacagccctgtgtactaggcccaaggccgccgtgactcagcccatgggaggatctcctgatttcttggttgcaaagatccatgggagaaaaatggtttctggggcggggtcacacactcatggcttctcttggctgtgcaagaaggttcctttggctctgttccaatatagcgtggttcatcacccacccctgttttctttgttctcctgagtcaagttgtttgcctagtcagtcccaatgtgagaacctgaatatttcagttcacgtgcttatcgtgaaattcactgagactttaattcagtggaaggcagcctcttctaattggccatcttggcccgccccctccacgtcacctcccataaaatggccacgctctccagggacgatgccattatatatctttacgtgaaaccgacagaacacttattacactttttgtgagctcatttacttcacttataatgaacatggccatggaaatgctagtggagaaagtggtcgattttctgatggatgtgataaaaaaatggtttgccgaccaattaatgacatatgtctcaaaactagtaacgagacccttaatcgctgggttgaagtttctaatcaagaagatgctcatctatgtattcaacaaagcagcttcccttgcttctgaaatgcttccaaacaacatctcatatttcctgaagaagataatgcctggacaagcagcacaagtcattcaggtttactttcagctcataaatccagcaggatattcgcacaattgttgggaaaccttatcagttcatgagtcgtgcatgtttcctttaatttcaggaggaagagggtaatctggaagagtttcctgacctactctgctgctgtgattaaacaaccaccaggaaattttgatgacactgttctcctgagctcctccctttcctcggggaagaaaagcattgaaactacaaaaataaagtgttatttggctggagtgaggtctcatgtctgcttatgcggtggctcgctgctcagaacagggtgagtctctgagttgtacgctgaggaggggaggctgtcaatctagaaaaaacccattgcatgggacacctccatggggtctggggggctgaggatgaggagctggactggatctagggaaggaggaggtttcagagggtgaaattctggcagtaaatcctgggggtgtttgaaaacttcctccctcagaaggagaagactcagggaggaataaggacaaaccatgggtcccttgaggggcatttactaacttaagaggactttatcgggaagcagagtgacaatggcctccttgaggactgaggcccctggataaatgaggcccagatccagatccagtccatgggagatgagaccttcaagggacatatttttgttgggacagaggaaaagtgcagctctgcagctgcagaggaagccttggcagtgtgaaagcgaccttggagggggccctgtgcgttctgaatgcttctgaggtccatcccctgtccccgcctctttttctggattttttgggctccatggtctccgccatcttctgagcgctccacgctgccaccttcagttttctcttctgggctccaaatactccaaaatctttcatatctgtgcccctacccctgtttttagcatgtgttgggactccaggtccctgaaggtttctggcctgaaatccacctccccagcggtgtggattctgctctagagaccccgcacttggcaaggttcccaggcccctgggggacaaccgagtggtatgtgcacttcagggctccacactcggcaaggtctttcaagcccttggggttccctcctcagttttcttcacatgtctgggatgtagtcactctataaatgccgggatgtgatccccaccccagtgattttttttagttccatgagtgttgctatctgaatagtcatcctgagagtgatgggaccttttgaatttgcagcaagttttagattagtgtgagtggcctgagatcgcaaaactggggctagcattggatgtgaggttaggctggtggaaaaatttgcccagaacctgaggagtgtgggctcactgcaggtggttaggatcagcacagaattgcaaggatgtatagctttggggtaaagaataacatggttcagaagtacatgtattagtcttttcatgcattgctataaagaattacctgagactgggtaattaattataaaaactcaggtttaattggctcatggttccacaggctgtacaaaaaggatgatgctggccatcagctcaacttctggggaggcgtcagaaaacttagagtcatggcaaaaagcacaagggaatcaggctcatcctccatggccagagctggagctagtggtaggagaggtgctgcacacttttgaacaatcagatctttttagaactctatcaccagacagcacctagaggatggtgctaaattattcatgaaatatccacccatatgatccactcaattctcaccggcccaaccaggaccacctccaccattggggattacaattacacatgagatgtgggtggggacacagatccaaactcgatcagtgggcatcttggactgggtctactatagaagaagaaccaggagctgactatcatccttaagactgcccatgatggccaggcagggtggctcatgcctgtaatcccagcactttgggaagccaaggtgggtgaatcccctgaggtcaggagtttgagaccagcctcgccaacatggtgaaaccctgcctctactaaaaacacaaaaaattagatgggtgttgtgccagacgcctgtaatcacagctactccagaggctgaggcatgagaattgcttgaacctgggaggcggaggtggcggtgagccccaatcgcactgctacactccagcatgggcaacaataccaaaacatcgtctcaaaaaaaaaaaaaaaaaaaaaaaaggctgcccatgaccactgccccagtgagagggacaccagcatggctaagatcaagtgctggacattcttcatgggtcagacattaaagcaggccacactgttacagagatgggctccattcatagcaacaaagtggtgagaagatgtgggaatggcagaggccagcactttgccatcaatgcaaggtgggcataaggagctggcaccagtgccagagtgcatcaggggaggactgctttgcaatatctagcacttacctcttagagtatgtttcattagggacaacagatataaatggcagacaagtgagtcccttcagtaacaggaaatagaaatcatcaagaggaacagaaacagatgtcagcagccctcatataaagtcatcatccttcatccagttaaaacctgagacagttctcacataagaaggtctaattcaaaaagagactgggttctcatgaggcaggttcatgcaaaaccaagggaagtatacaactttgggattctccagcttcccttggaaaagacctacaatcatttgcttaggtaactgagcactgaacaaaggtgagtattgttatctttcagaagctgttggccatgaaggtcttgctggcataaaacccatggttggaaacatcaccatgacccctgttagagtaatggcctaagggcaagggtcaggaaattgatgtattccttgccaacttctgcgagacgagtgttggtccactcatctctttcacggaattcaccagtctggtatcttcaaaatccagaaggatgatggcagatggcaggaaactaatgcaaacaccatcagttgtacctccactgtagcagcagtaatggatgttatctcttcattgtaatatccagggagggagaagatgacattattctcaatattctaaacaccctgtgtgtacagcctctgtgatattttttgtaatatccgtgtgggagagaattatattactcctaatatctcaggggttgtgccccctctgtgacaatgttcctaacacccaggaggggataggatgatatcacttttagcatcacagggggtgtacaccccactgtaatattgttcataatatccgggggggagagaatgatattactcccaatatcgcaaagactgtacaccaacctgtgatattatttgtaatatccataagaggaagaataatattactcccaatgtcacaggaagtgtacacccttctgtgatattgttcaaaagatccagttagggaggggatgatattactctcaatatcttaaacaccctgtaggtaagccctctgtgatattcctcataatatccagagggagaggatgatattactcccaatattgcatgaagtctacaccccacctgtgatattgttcctaatatccaggatgggagaggatgatattactcccaatgtcgcaggggatgtacaccttccctgtaatattgttcgtaatatctagaaaaggagaggataatattactttcaacatcgcagggggtgtacaccttccttgttatattgttgctaatatccagggaaaaagaagatgacattaccaccactattgcagaaggtgtacacccccccttgatatagttcctaatatccagaaaaggagaggagatattactccaaatattgcaagaggtgtacattcccctgtaatatttttcctaacattcaggaagaaagagagtgatattgcccttaatattgaagggagtgtgccccccccgtgatattgtttctaatatccaagaaatgaaaggatgatattactcccaatatcacaggggctgtacagccccctcccatgatattgttcccaacatcggggggggggtgaaatagtattattcccagtatcacaataggtgtacacacctgtcgtgatattgttcctaatacccatgggggaaaggacgatattattcttaatatctcagagggatgtacaccctccctgtgatattgttcctaatatccggggtgggagaggatgatattacccccaaaatctcaaagggtgtacacccctcttgtgatattgttcctaatatccagggtggagaggataatattattcccaatatccaggaaaggaaacgatgatgttactgtgaatattccagggggtgtcctcccctctgtgatattgttcctaatatccaggttggggagattatgatatttctccaaatatcacaaggggtgtacaccaaccctgtgttattgttcctaatatcgatggggggagaggacgatattactcccaatatcacagggggtgtacaccacctttatgatattgttcctaatatccatgaagaaagaggatgatattactttcaatatcgcaggggatgtacactccccctgtgatattgttagtaatacctaggagaagaaagtgtgatattactcccaatatcgcaggggatgtacacgcttcctgtgatattgttcctaatatttagggggaaaggggatgatattactcccaatatcgaatggtgtgtacacccccccgtgattctttttttttttttttttttttttttgagatggagtcttgctctgccgcccagactggcgtgcaatggcgcaatctcggctcactgcaacatttgcctcccaggttcgcacgattctcctgcctcagccttcggagtagctgggattataggcagctgtcaccataccaggctaatttttgtatttttagtagagttggggtttcaccatgttggtcaggctggtcttgaattcctgacctcaaataatccacccaccttggcctcccaaagtcctgggattacaggcataactttccctgtgatattcttcctaatattcaggaagaaagaggatgatattgctcccaatatcgcagagagtgtgcactcctcctgtgatatggttcttaatattcagaggaggagaggatgatattactttctatattgcagaaggtgtacacctccctcgtgatgtctttcctaatatccagtgggggagaggttattagtctcaaaatcacagaaggtgtaaacccccatttgatattgttcctaatattcaggggtggggagagaaaggtattactcctagtatttcagggcatgaacacccccaccgtgatatcattcctaatatccagaaggggaggcaatgatatttctcctaatatcacaaagggtgtacaccccttctgtgatattgtaaatattctgtgtgtacacccccctgtgttatagtctgtaatatccgggtgggggagagggtgatatttctccccatattgtaggggatgtacacccttctgtgatatggttcgttatatccagggaagaaaaaggtaatattgctgcccatattgtggagagtgtacacccccatgtaatatggttcgtaatatccaggagtggagagggtgatactgctccttacatcgaggaaggtgtacaccttattgttatatgattcgcaatatccaggggaggagagagtgatattgctccccatgtcgcagggggtgtaaaccctccgtgatatgattggtaatatccaggaaaggaaagggtgatatttctccccatatcgcgggggacgtacatcctcctgtgatatggttcgtaatatccaggaggaaagaggaaaatattgctcttcataacccgaggggtgtacaacccctgtgatatggttcgtaatacccagaagtgtacacccctctgtgatatggtttgtaatatccagggggttagagggtgatattgctccccatatcgcagtgggggtacacccccctggattggttcataatattcatggggggagaaatttacatttatcctcatatcagggggggtgtacaccccccgtgatatggttcgtaatatccaggggaagaaagggtgatattgctccttatatcgcggaaggatcaccctcccctgtgatatggttcataatacccagacgggaagagggtgatattgttcttcataaagcgaagggtgtacagccccctgtgatatggttcataatatgcaaaaggggagagggtgatattgctccccatatcacggagggtgtactcccttctttgatatggttcgtaatatccaggggtgtagatggtgatatagctcgccctattggggagggtgttcacccctctgtgatattgttcgtaatgtccagggaaagagaggatgatattactcccaatatcgcagaaggtttacaccactctgtgatattgttcataatatccagggaaggagaagacgatattactcccaatatggcagggggtgtagaactcctgtgatattgtttgtaatatccaggcaaggagaggatattactctcaatatcgcagaaggtttacacccctatgtgatactgttcatgatatccagggaaaaagaggatattactccctatatcacaaagggtgtacacccctttgtgatattttttgtaatatccaggggagagaggataatattactctcaatatcagaaggggtgaaaaccctcctgtgtcattgttcataatatttagggaaggagagagtgatattactccaaatatcacagtgggtgtacacccccctatgatattgttcctaatttccagaaggggagatatgatattattgccaatatcgcagaaggtgtacaccttactctgacattgtttgtaatatccagatggggaaatgatgatattactcctaatatcacagggggtgtacacccccttgttttattgtttgtaatattcaggggaagagacgattatattactcccaatatcgcagggtgtgtacaacactctatgatattgttcataatatccaggggaggagaggaagtgtacacccccccgtgatattgttcgtaatatccagaggtagagaggatgatattactcccaatattgcaggtggtgtacacctttctgtgatattgtcatgatattaagaaggggagaggatgatattactaacaatatcacaaaaactgtacactccctgtgatattgttcataatatccagaagaagggaggatgatattattctgaatctcgcagaagatatacaccaccctgtgatatggttcataatatcctaggggaaagaggatgacataactgtcaatatcgcagggggtgtacaattccctgtgatattgttcacaatattcagagggaaaaaggataatattactttcaatatcgcaggcggtgtacacattactgtgttattgtttataatatccggaatgagagaaaattttctcccaatatcacaggaggtgtacactcccctgtgatattgttcgtaatatccagggaggggagaggatactattactcccaacatctcagggagtgtaggccccccctttgatattgttcctaatattcggaagtggagaagatgatattacttccaaaatcgcagggggtgtacactccctctgtaatattgtttctaatattcatgagtggaaagaaagatattactcccagtattgcaggggacatacaccacactgtgatcttgttcacaatattcgggggggagaggatgatattactcccaatatcaaagtaggtgtacacccccttctgatattgatcgtaatatccagaattaaagatgataacgttactcccaatattgcagggggtgtacatttttgaatactgttcataatattaagagggggaggggatgatatctgtcccaatatcgcaaagtgtgtacacctcctgtgacattgtcccaaatatccagaggaaaaaaggatgttattactcttaatatctcagagagtgtacacctccctgtgatattgtttgtaacatccagaagaaagaggctgatattactcttaatatcgcagggggtgtacacccccgccccgggatattattcgtaatatccagggggaagtggaatgttcagaatgggagaggatgatattacttgcaatatcatagtgggtgtacaccccactgtgatattgtttgtaatatccgggaaaggagaaaatgacattcctccccatatggcaggggctgtacaccacctatcatattgttcaaaatatccagaaggggagaggatatgtctccaagtatcacagggggtgtacaccccgctgtaatattcttcctaatatccagggtgtgagaggataatagtactcccaatatcccagggcatgtacaccccccttgtgatgttgttcctaaaattcatggggagaaagaatattactcccaatatcacagggggtgtacatacactctgtaatattgttgccaatatgcagcaggagagaggatgatattactcccaatatcacaggggctgtacaccccgctgggatattgtttctaatatcaagggggaaaaaggatgatattactcccaatgtcgcagggtgtgtacttcctctttgtgacattgttcctaatatccaggagagaagagggtgacattccttccaaaactgaaaggggtgtacacaccctttgagatattgtctttaatatccagaacgaaacaggatgatataactcctaatactgcaggggggtacaccctctctgtgatactgtttctaatatccaggaggggaaagaaaaatattaatcccaatatcacagggggtgtacattccccctttaatattgttcctaatatccaggaagacacaggatgatactatttccagcagcacagggcatgtacacccctttgtgatattgttcctaatatccaggaaaagagaggatgatattactgtcaatattgcagggcgtatacactggttctgtgatattgtttctaatatccgggggtggagaaaatgatattactcccaatattccagcgggtgtacacccgttctatgatattgttcctaatatctgggggagagagaatgatattattgtcaatatcacaggggatgtacagattccctgtgatattgtttctaatattcacagggggagaagggtataatactcccgatatcgcagggggtgtacactccccctgtgaagttgttcctaatatccagggattgagagaatgatattactcccaatatcacaggcggtgtaaaccccctgtgtgatattgttcctaacatccagaggaaaagatgatgatattattttcaatatcacagggggtgtacgcatccctgtgatattgtttctaatatccaggggaggagaggatgatattattgttaatatcgcagggggtgtaccccaccctgtgatactgttcctaatatccggggtggaagaggataatattgctcccaatatcgcaaagggtgtacaaccttcctgagatattggtcctaatatccagggagggagaggatgatattactttcaatatcacagggagtttacacaacccctgcgatattgttcctaatatccagcggaagaagagttaggataatactattttcaaaattgctgggtctgtaccccctccccgtgatattgtttctaatatccaggaggggagaaagtaatatgactcccaatatcttagaagatgtacaccctccccataatattatttcttacatccagggggtagaggatgattttgctttcaatatcacagagggagtaaacctttccggtgatattgtttttaatatttaaaaagagagaagataaaattactcccaatacaaaggggatgtattgtgtactcccccctctgatattcttttttaatatccagatggagagaggatgatattactttcaatattgcatgggatgtataaatcccctgtgttattgttctgaatatacaggtggggagagtatgatattactccaaatatcgcagggggttctttccccctgtgatattgttcctaacattcagggagggagaggatgatattactcttaatattgcagggggtgtacccacgcctatgatattgttcctaatatccagagggggagaggatgatctaactcagaatatgacaaggggtgtacacacagcctgtgatatggttcctaatatacaggggagaaggggataatatttctcccaatatcgcagggggtgtacaaccccctgtgatactgttcctaatatacagaaggggacagcatgatattgttcctaatatcgcaggaggtgtacaacgccctgtgatattgttcctaatatccagggcgggagaggatgatattaccctcaatatcgcagggggtgtgcactttccctgttatattgttcctatgatccgggtggggggaaatgacattagtcccaatatcgcaggatgtgtgcaccgctcccccgtgatattgttcctaatatcaagggggagagaggaggatattactcccaatatcgcaagggatgtacatcctccatgcgatattgttcgtaatattcaggaggagagaggatgatattactcttaatatcgcagaaagtggacacccaccctgtgatgttcttcataatatccagggaagcagacgattatatgactttcaatatcgctgggagtgtacatcccttttgggatattgtttctaatatccaggaagggagaggattatattactctcagtattgcaggcagtgtacaccttttttgtgatattgttcctaatattcagaaagggaaaggatgatattactcccaatattgcaggtggtgtatatccccctctgatattgttccttatatcaaggaagagaaagaataatattactcccaatatcaaagacagtgtagacccctcctgtgatattgtatttaatatccatggggaaagaggatgatgttactcccaatatcgcagggggtttacacccacactgtgatattattcctaaaatccagtggaggagaaaataatattgctcccaatattgcagggtgtatacaggccctcccccgttatattgctcctaatatccagcggtggagaggatattactttcaatttgtgtagggagtgtatacccccctgtgatatttttctaatatcaaggatgggaaaggatgacattactcccaatatcgcaggaggtgtacacgccctgtgatattgttcctaatatctagggaaggagaggatgatattactttcaatattgcaggagctgtacaccctctgtggtattgttcttaatatttaggttgggagaaaatgatatgagtccaaatatcgcagaaggcatacacacttccaataacattgttcttaatatccgggggagagggtgatattactcccaaaatctctggggggtgtacacccccttctgatatttttcctaatatccagggaaggaaacgatgatattactataaatattccaaggagtgtacaccttcctaatatcctaatattgttcctaatatccaggggtgggagaggattatattactcccgatatcgcagtgggtgtacacccctcctgtgatattgtttctaatatccaagctaggagaaaatgatatcactctcaataccacagggggtgtacaccttccgcatcatattgttcctaatattcagagggaaagaagatgaagttactttcaatatcggaggggttgtacacaacccctgtgatattgctgctagtatccaggaagaaaggggattatgttactccccttatagcagggggtatacacctcccctgtaatattgttcctaatatcaaggctgggatatacgtggggggaaggatgatattactcccaatatcgcaggggttatacaaccttctgtgatattgctcctagtaaccagggcagaagaagatgatattactcctaatatcgcaggaggtgtacactcccccattatgttgttcccaatatgcagaaaaggagaggatgacattattgccagtatcgcagggtgtgtacaccacccctgtaatattgttccaaatatttagggggagagaggatgatattactcccaacatcgcagggggtgtacacacatcccctgtaatatagttcttaaaatctaggggaaaaggggatcttatttctctaaatattgcagagggtgtacactccccggtgatattgttcctaatagccgggagggagataattaaattactttcaatatctcagagagtgtacatcgcccttgcgatattgttcctaatatccagagcaaaagagaatgatattactcccaatatcttaggagtgtacatttaacctgtaatattgttcctaatatccagggggaagagaatagtattactgccaatatcgtaggggttgtacaccttttctgtgatattgttgcaaatatttagtagagggaaagaatattactcgcaatatcacagggaatgtatacttcccctgtgatattgttctgatatccagaaaaagagagggtaatattactcccaatattgcagggggtgtacaccccccttgtgatattgatcctaatataaaggaaggaagaggatattactcctcatatagaaggggttgtccaccccccttgtgatattattcctaatattcagggaagcagaggatgatattattttcaatatcacagagggtgtgcagtccacctgtgatattgttcttaatattcggggggagaggatgttattatgcctgatatcgcagtagaggtacacccctcaagtgatactgttcctaataaccaggggtgaagaggatgatattactcccaatatcgcaggtggtgtacacccccccatgatggtttctaatatacagagggggagaggaaaatattactcccaaaatcgctggaggtctacaccccccttgtgatattgttcctaatatccaggaaaggaaacgatgatattactgtgaatattccagggggtgtacacccgctttgtaatattgttcctcatatccagggtgtggagaggattatattactcccagtatcgcagggggtgcacgacgcccctgtgatattgtttttcatatccaggaggggagattattatcaatatggcaaggggtgaacaccccctgtgatattgtacttaatagttaggttggcagaaaatgatattagtctcgatatcgcagggggtgtgcactccgcctggtgatattgcttttaatatcaagggggagaaaatggcattactcccaatatcgcagggggtgtacaccgctcatgtgatattgttcctaatatccaggtggagagaacataatattactcccaatatcgcacaaggtgtacacccctcctgtgatatggttcctaatatccatgggaggagatgatgatattactcccaatatcacaggggatgtacaccacccttgtgatattgttcctaatatccagggaagaaaacgatgatattattgtgaatattacagggagtgtacacactccctgtgatattgtttttgatatacagggtgggagaggatgatattactcccaatatcacataaggtgtacaccccccgtgatattgttctaaatatttcggtggggagaaaatgatattagtctccatatcacagggggtgtgtgctcctcaggtgatattgtttttaatatcaagagggggaggagattatattactttcattatcacagggggtgtacacccctcctgtgatattgttccttatatccaggcgaggggaaaataatattactctcaatatcgcaggaggtgtacacaccccatgtgatattgttcctaatattaagggggaaagaagataatattactttcaatatcacagggtttgtactcctttcttgtgatatagtttttagtatccagggggaaagagcatgatattactcccattgtagcaaggggtgtacacacctcctgtgatattgttcctaatatccagaagtggtgaggatgatattactcccaatatcgcagggggtatacaccccacctatgatattatttctaatatccatgggaaaagagtatgatattacacccaatgtcgcagagggtgtgtatttttcctgtgatattgtttctaatattcaggcggggagaagatgatattactctcaatatagcagaaattgtacatccccgctgtgatattcttcataataatcagggaaaaagaggatgatattactaccaatattgcaggggggttacacttcccctatggtagtgttcctaatatccaggaagaaagaggatgatattaatcccattatccaggaagtgtacacccaccctgtcatgttgttcctaatatccagcagggaagaggatgatattacaccccccccccgtgatattctccttaatatccaggaggggagaggctgatattactggatatatagcaggggtgttcataccttctgtgatattgttcctaatatccagaaaaggagaggatgatattacttccaatatcgcagaaggtgtacacctccctgtgatattgatcctgacattcagaaggggagaggatgatattactcaaaataccgcagggcatgtgcattcccttgtgatattgttcctaatacccagaagggaacaggataatattactttcaatatcgcagggagtgcacacccccctttggtatggttcttaatatccagaaggaaagagggtgctattactttccatattgcaaggggtgtacaccccactgtggtatggttcataatatccaggcagggagagggtgctattactccccacagtgcggggcatgtacaccctgctgcggtacggttcctaatatccagggggagagaggatgctatgactccctatatcgcggggtgtgtacacccctgtgtggtatgttttgtattctccaggaacggagagggtgttgttacccctcatatcgctggaaatgtacactcccctgtggtatggttcgtaatatccaggggattgagggtactgttacccccatactccccatatcgtggggggagtgcacctccctgtggtatggttcgaaatatccagggtaagagagggtgctattattccccattttgcaggaggcgtacacccccctatggtatggttcgtaatatccggggtgaggggatgctatcaaaagaagagagaaagagaccccccatattgttctatattattttatactcagtacctgttttaagaagaaacaaggaagtgaaaccaaaagcaggcagcccggcgccaggcaccagacccaaaaccagacccgaaaccaggcctgggcctgcctgaccttagcctgatagttaaaattcaacccatgacctagcaaccaatgttatccatagattccagacattgtatggaaggacattgtgaaatttcttgttctgtgctgtttcactctgattaccggtgcctgcagcccctgtcacatacccactagattgctcaatcaatcatggccctttcatgtaagatctttagtgttgtgagcccttaaaaaggacagaaattgtgcactcaacaagctcggattttgagacgctagtctttcgatgcttccagctgattaaaagccacttccttcactacctcggtgtctgtggggttttgtccgcgactcctcctgctacactatgactccccatatcaaggggggtgtacacccccctgtggttcgtaatatccagcaggggaaaaggtgctattactccccatattgcagggagtgtacacccccttgtagtatggatcgtaaaatcaaggggggagggaaggtgtaattatccccatatctcagggggtgtacacccctttgtggtaaagtttgtaatatccagggatattacagggatattatccccaaattaatacttttataatttcttatgcctgcctttactgcaatctctgaacataaattgtgaagatttcatggacatttatcacttccccaatcaatacttttataatttcctatgcctgtctttactttaatctcttaatctcatcatctttgtgagctgaggatgtatgtcgcctcaggaccctgtgatgattgcattaactccacaaattgtttataaaacatgtgtatttgaacaatatgaaatctgggcaccctgaaaaagaacaggataagagcgatgttcagcgaacaagggagataagcataaggtctgactgcctgtggggctgggcagaacagagtcacatttttcttattgcagaaaatgagtaggagaaatatcactgggaagggaacgcattcctaggggaggcctatggacggccgctctgggggtgtatcccttatgtggttgaagataagggatgaaatacaccctggtcccctgcagtgccctcaggcttgctaggattagaaattccagcctggcgaattctagtcagaccagttctctgctcttgaaccccgtttcctgttaagatgtttatcaatgacaatgcgtgcacagcaggacatggaacctcaatagtaattccattttctccctggccttgtgaccttgctaggcccttctgcccttgtgatcttttattgccatttgaagcatgtgatctctgtgacccactccctattcgtatccccctccccttttgaagtccctaataaaaacttgctggttttgcagatcaggtggtcatcacagaacctgccgatatgtgatgtcaccccggaggctcagctgtaaaatttctctttcgtactctttcactttatttctcagaccaggtgacacttaaggaaaatagaaaagaacctactttgaaatattgggggctagttcccccaatagacattgttcctaatatccagaaaaaaagaagatgatattactcccaatatcacaggggttgtgaaccccacctgtgatatggttcctaatatccaggaagggagagaatgatattactctccatattgcagggggtgtgcacatccctgtgatattgttcctaatatccaggggaggagagggtgatattactcccaatattgcaagggttgtaaactccaccctgtaatattgctcctaatatttaggatttagggggggagaggataatattactcccaatatcgcaggggatgtatatgccctctttgatattgttcctaatatccagggggggagaggataatattactttccatatcacaaagagtgttcacccccctgtgatattgttcctaatatccaaaaaggaagaggatgatatcaatcccaatatcacaggaagtgtacaccccccccttttatattgtttctaatatccaggggaaatgagggtgatatttctctcaatatagcagaatgggtacactccccctgggatattattcctaatatccaggggaaaaaaagaggttgatattcttcccagtatagcagggaatgaatacaccctttgtgatattgcttctaatatcaaggggaaaagaggatgatatgactcccaatatcacaggggatgtaaacctgtggcgttgttgctaatatcaaggagggaagagtatgatattactcctaatgtcgccgaaggtgcacactttccctgtgatattgttcctaatatccaaaagggaagagaatgatattacccccagtattgcagggtgtacaccacccctgtgatattgctcctaatacccaggaaaaaagagaatgctattacccccaatatctaaggggacgtataccttccctgtgatattgtttctaatatccaagtggggagaggatggttttactctcaatattgcagggagtgtacactccccctgtgatactgtttctaatactcgggctgggagaaatagtattactcccaatatcgcagtgatattgtttccctgtgatattgtttctaatatctagtgggggagataattatattactaccccatacacaggggagggtgtacattcccctgtgatattgtttgtaatatccagggaaggagaggatgttactcccaatatcacaggggttgtacaccccttttttgatattgttcctaatatctggggggcagagaattatattactgtcaatatcacagagtgtgtacaccccctctgttatattactctttatattcagggcggtagaggatgatattactccctatatcacagggggtgttcacccctcctgtgatattgtttataatatctaaggggaaagaggatgatatcactctcaatatcaaaggaaatgtacacctttcctgtgatattgtttttattatataggggggcagaggatgatattaagaacaataccacaggggatgtacacccacgtattgatattgtccctaatatgtatggggaaagaggacagtgtaactcccgatatcgcagagtgtgtacacccccttgtgatattgtttctgatatacacggggagaaaagataatatttcttccaaaattgcagggggtgtacaaccccctgtgatattgtttttaatatccagtgggggagagaatattactcccaatattgcagggcgtgtacacaacccctgtgatattgttcctaatatccagagtaggggaggatgacattactttcaatatcgcaaggggtgtacattcccctgtgatattgctcctaatatccatgaggggagaggatgatattattcctaatatggcaggggctgtacaccttccctgtgatattgtttctaacatccagtgggggagaaaatgatattactccctatatcacagaaggtgtacactttccctgtgatattgttcctaatatccagaaggggagaggataatattactcccaatatcgcaggaagcttacaactcccctgtgatattgtttctaatatccagggaggtagggatgatattactcccaatatcgcaggggatgtacactcccccgtgacattgtttctaataaccagggggtgagaggatgatattacgcttaataccgaagggggtgtacacacccttgtgatattgtgcctaatagccagggggaagaaaattatattaattttaatatttatggggaaaaaggatgatattactcccaatatcacaggggctgtacaccgaccttttgatattgtttttaatatccagaagagaagaggataatattgctcccaatatcagaaaaggtgtaaaccccttctgtgatattggtcctaatatccagggagggagagaataatattactaccaatatcacagaaggtgcccacccccaaggtgatattgctcctaatatccaaagataatagggtgatgttactcccaatatcacaggaggtgttcacaccccttgtgatattgtttctaacgtacagggaagggagaggatgatattattcccaatatcacaggaggtgtatactcctctgtgatattgattttaatattcggggggaaaggatgatattactccctatatcgcagagggtgtacaccctctgtaatattgatcctaatatccagggcgggataggatgatattactcccaatatcgcagaaagtctacacaacccccagtaatattgtttttactatccagggggaagaggatgacattactcccaatttcacagagtgtgtacactcaccatttgatattgtttctaatatctagggggagagaatatattactcccaatatcacaggaattgtacaccacctctgtgacattcttgtgaatatccggggaaaaagagaataatattactcccaatattgcagagcgtgtacacccctccatgatatcgatactaatatttttttaaagaggatgatattactcccattgtcacaggatgtgtacaccccccttgtgaaattgttcataatattctggggggagagcataatattactccccatatcgaaaaaggtgtccaccctccttataatatggttcctaatatccaggatattacttaatccaggatacttgtaataccctaaatatacaattgcttgaacctccacctcccaggttcaagcaattcttctgcctcagcctcccgagtagctgggactacaggggcacaccaccacacccagctaatttttttttcttgtatttttagtagagatggggttttgccatattggccaggctggtctcaaactcctgaccttgtgatctgcccacctcagcctcccaaagtgctgggattataggcgtgacccaccgtgccaagccaggaagaggatgctctatagatttccccaataagagatggctttgcagggccattccaaaatatgtcaaagaaatacatttggggataaaatactttgatttcctttagggaatgttatctattatgtgatgctataccagagtcaggttggagtcggttatcttattgcaacaaagagtctgttccgtcactgttgggatctctattttttcctcttatttcttgagacagggtctcactctgtcacccagtctggagtgcagtggtgcgatcttcattcactgaaacctctgcctcctgtgttcaggtgattctcgtgcctcagccccttaagtaactaggattacaggtgtgcgccaccacacccagctaatttttgtattttcagtagagatggtattttgccctgttggccaggctggtcttgaactcctggcctcgtgtcatctgcccacctcgacctcccaaagtgctgggactgcaaatgtgagctattgtgcccagccaggatctctgttttaatgttagtgctggtcactttgcatgaactccaaagggaagaaatataatgaggtgtgtctgaccccctgccttctcatcgtgacctgaattagtttttcaggtttgcaggggatacccttggacaagaaggggctctattcggttggttggggggattagaattttactttttgtttacaatatttctcctgaaagagttaggggctcacaaggaatttccgcgtgagcaacttatgaggaaagccatctgggaagatatgtgtccttgtgtcactgggatattctcgtttaccccaatgatacggcaatgacgcagggttgtgaaattacagctatgtgtttggggaaaaaagaaagcaggattgtgtgactacgtttccaaacttcacttgcccttagccatagtgagttgggggcctggagattctgttttctttcacaatgatatagatacaattaaatgtatagaaagcaaaaaaataaaaaggtgagtaatgaggaacctctgattcctgagtggccatgtagttacccatggcacagagccacagttactgaaggtaaagtttgctggggaatttagaaatgaatccagctcttggaggagtcagtttactggatgcctaagaaaatgcaaacaaaataagaaaaaagggtaatattcaatcccatagttattgttacctgtcatagctaaagtaaaattaaaacagagtgctggcttcaatcttgatgctacactaagcttagatttcagtgaatgtgagtctcagccactagctcagagccacctcccaaagaccaaatcatgtagggacaatagaaagtacttctgagaattgtggttaccaagaacctagtaactgttggggaggagcaaaacaaagtacagaaaccagagggtacaatctgagtgagactgctatcagcttctggaggagcctttactaaaatgaatgatgagagtaactggatgatgagagtaactaatggatgatgagagtaagcaatgtctttggttttcttttttttttttttttttttttagcagacgtctcactcttgtcgcccaggctggagtgtaatggcatgatctcgcctcactgcaacctccacctcctgggttcaagcaattctcctgtctcagcctcccgagtagctgggactacaggcactcatcaccacacctggctaatttttgtatttttagtattttctggtgagggtccaggtttccggaaacaactcagagacatatgttaagatgttatctttagttttcacagggaaccaaatatgttacgactccaatttccttggctattgttttaagttaccattaccttctcgttgatcaagttgctcatttacttctcaagcctagctagatgcctggaatttcccttgaaggaagtcaagattttcctttatctccatactggctgatggtgatcgagtaagcccctaagaggggtccctgctccatctcgagatgctgctagattctacagtgcctaataaacagctctcgcctggccgacaaagagctgcttgctctctggatagcaattccaaagtgaacagacaacatcctgtttggaagactgccactctgttagaagaagcatcaggaaaacctttcttttgagctatttataactaacagcaattgaccaagtatacttttgtgagtgaaactgacctttctccctgtaagaattctccaaaatttggaaactatttgtgagtatttttacttatggcaatataattattggcacaagctcaatcagattcggttttctttcgtaacaggaaccattggagatactcattactctttgaaggcttacagtggaatgaattcaaatacgacttatttgaggaattgaagttgactttatggagctgataagaatcttcttggagaaaaaaagactgggtatattttcaatatgctttccttttaaggtccctcacctgtggaaagtaaagaatgtcactttctgacaggctcaggaacctcaagttatgtagggatctcaagaagatgggggaattcacccagttcatacaggtgaaattgctgttgcaaagattatgaatatgagagaagtccagcatggctgacttcatctcgtgtctggcctcaggctggctgcccttgctcactcttgggcataggccaagctagccatgggaggaatttagtttatagtttaactttgaagcacggatgataatagtctctccctaaaatgaaccccttccttgctcagggactgaaactacctttgtatgacaaatgaaagcccacaagattaagattatgagaggggcctgaattctgctaaaatgcaggtgtagctgactgataacaagtcattgtcccacagcttgcctttctataatctcttgcttctcaggagtcacatggccagaggtcctgagatttccagtcctgtgacccccacccagagatggacttagtgcatgaggaccattttccacacccctatgatttcatcctcaaacaatcagcagcaaccattccctagccccctgccttccaaattatccataaaaatcctagcctctgagttattagggagattgattaataatcccagtcctaccccttgggttgctctgatttaattaaaccttctctactgcaataccacggactcagtaaattggttttgtctgtgcaatgggcaagaagaacatgttgcatggttatacaggtactacaagcacagtctgatggcaaattattggttttgcttcctgcccttgatgtttctaaacatctagtccaaaattacttgtgaaaggtccagcaaagccaattttaaaagaggctatatggccaatcactattctttctacacattattgcaaataatcaggccacggctgggcacggtggctcatgcctgcaatcccagcactttgggaggctgaggcaggatcacctgaaatcaggagttcaagaccagcctaggcaacatgataaaaccctgtctctactaaaaatacaaaattagccaggcatggtggcatgcacctgtaatcccagctacttgggagactgagggaggagaatcacttgaacctgggaggcagagattgcagtgagctgagatcacaccactgcactccagcctgggcaatagagtgagactttgtctcaaataataataataataatcagaccaagtataatgaaattaaaatttattttgcaaataaattggtcctactacaatttatccttcatagaaatgtggaaactgaagataaaaaaaattaggtttcagaagaaaactatactacacctgttattagattctagccctaaacattgtttttgaggtttttattatttacctgcaatttggtctaaattctgaattatttcctgactacaagtatccaaggaataaatgggttttctttttctttatgatagttttagttggcttctaatgcaacaacaatttttattgtaatcctgtgtgcattctattcctactattcaaattattaatgttatagatctttcattgtagtacttctgaattaaccaaaatcacagtattctgaagatgattctacaaagcctgctgtttctacaaaggctgctgatgatttctacaaagcctgctgtagtgttgctgtggcctctgcttaaaaaagtagaaaacacattgatgcagcatgttcaccccaacctccctgcctaaaggctcagggaccatcttggaagaggaaggcgcgtgagattgtaagagccgaattagggggatggagtgtggagaataaggacacttcatcttggatgctcacctgccaaattgacttctgatgaaagccagctccagaaatgtgcctacagttactactttcacctaaaccctgcccttagtcaaatccttctcttcttctaagcaatcaacttcaattccttgtataacccacagtataaaagggcttttataccattctatcctattgcatgtaagccttgggtctgggaggtaacagtgtgggattccaccatctcatctccctgccacccaaacatgcctgctcttctttaagcaatattaaatgtttgtacttcagaaatttgatttgtcagcctcttcttcagactctcagcttctttggcctttgggagtaaatttgcataggcctgctcaaaacaggatgttctgggggtttgggggtgttgttttgttttgttttttgttttgtttagagacagggtctcactctgtcacccaggttggagtgcagtggtgcaatcatggcacactgcagcctcaaactcctaggctcaagcaatccccccaccttggcctcccaaagttctgggattacaagcataagccaccatgcccagccctggacttttctttaaagacatttacacagtgtaggaattactgtgggtgcactgctcaggtccccttctccaggatgctcattcctacctcatagatgattttcctgcagagatttgacctcagctgaagggcagtcacctggtccaggtggttgctattcacctccttcctgagaacagccaacagccagggacacgctagcacagagatataagagcgaccaaggtgaggccccttctgtgctgcggtgcatgctccagagcctccctgggatcagacttaagagggtctccagccagatctggtcttcgctgctttcctcgagctccccagcgcactcctgcaatgcatcttttttttttttttttttttttttgagacggagtttcactcttgttgcccaggctggaatgcaatggcgcaatctcagctcaccacaacctctgcctcgcgggttcaagtgattctccttcctcagcctcccaagtacctgggattacaggcatgcaccaccacgcccagctaattttgtatttttagtagaaacgggtttctccatgttggtcaggctggtttcgaactcctgacctcagttgatcctcctgcctcagccttccaaagtgctgggattacaggtgtgagccactgtgcctggcccaatgcacctcttgaatcacctcctcatgctttgcttttagagaacatgatccccaacatgtgattccagcaaagattctagaaagccaaccgtgacaatcacttctgggtttagatgacccccccccaccacaagatggcagtgagcacctcatcacagaggtgctgatggtctgcagcaccgcgccaggccagaacgtgccttttacagaagaaaataacccagtagctgactaggatggtgaggagggctggtgagcactgcggtagtgagagggacactagcatcactgagatgcaagtgatggtcatttttcataggtcaaagctcaaagcaggggacagttacagggcagggcttcatagcaccagtgtgatgaaagtatctgggagtggctaaggccagcactatgccatgggaagcaaggtgggcctgaggaggaggcagcagcgtcagcctgcaacaagtgggggctgccctgcagagacctaagagtcatgttatagagcacagtgtctgtaaggccaagaagtgtggacagccaagtgtgtcaattactagacatactcaagaggagcaggaagggcagggcatggtggctcatgcctgtaatcccagctacttgggagactgaggaaggagaatcgcttgaacccgggaggtgaaaattgcaatgagccgagatttcgccactgcactccagcctgtgtgatgggagcgggactccatctcaaaacaaaaaaagaaaaaggaaaaagaaaaaaagaaaaacctaggtatacttctcaagcaaataaaaataatcaaaaccaatatcatgcccgggcacaaatttcatatatataacagatttaaatatatgagggtgattatcctctcatatctccatttttttttgtttttccatttttttctttactaaaaaaagttaatgccaatgacacacaatttttttttttttttttttttttgagatggagtctcacttcttcgccctggctggagtgcaatggcgtgatctcgactcactgcaaagtctgcctcctgggttcaagcaattctcctgcctcagcctcccaagtagctgggaccacaggagtgagccaccacacccagctaatttttgtatttttaatagagacggggtttcaccatattggccaggctggtctcaaactcctgatctcaaataatctgcccgcctcggcctcccaagattctgggattataggcgttgagccactgcgccccgcctatgtatgattttttttttaattttattttcataagtttttggggaacaggtggtattttgttacatgagtaatttctttagttgtgatttgtgagattttggttcacccatcaactgagaagtatacactgaacccaatttgtggtcttttatccctcacccccttcccaccctttcccccggagtccctgaagtccattgtatcattcttatgcctttgcatcttcatagcttagctcttgaacccttactttctgtttgagggagaagacatatcatctacaagtagatactgtgtaaacattccattgcatgactatcccataacttatttattatttgtgtttggttatttgctgctatgtaacaaccccactcccaactaaatggtgtgacaattccatgattctgtggatcaaaaattctgaaaagtcaaacccaaggagttttgtctctgctccatgatgctaaagcctccgcaggggtgaggcgaatggctcagggtgactgaaaagctcagggttggaacagctggggatgaggcctctatgtataagatgattcttcactcacaggtctgaaactatggtggggacagccagaaggctcggctcagctgggacagtcacctgagccctacacatgacctctccaacatggtgatcctgaagcagttgggtttcttacacagcatcacacttttcttttttttttttttttttgagatgaaatattgctctatcacccaggctggagtgcagtggcacgatctcagctcactgcagcctccgcctaccaggttcaagcgattctcctgctccagcctcccaagttgctgggattgcaggcgcctgccaccaagcccagctaatttttgtatttttagtagagacggggtttcaccttgttggccaggctagtcttgacctcttgacctcaggcgatccgcctgcctcggcctcccaaagtgctgggattacaggcatgagccaccgcgcccggccaaagctcacacttcttatgattcagccttagatgtcacatcagttcattttccccacacttattagtgttagaagtcacaagcccacccatactcaggggactggcacacagaccccactctcaatggaaggggtgggacaccaccattcctgctgatgggcatttgggtaacttcctgtttgaagctattaagattgggctgctgtggccgggcgcagtggctcacgcctctaatcccagcactttgggaggccgaggcgggcggatcacgaagtcaggagatcgagaccatcctggctaacacggtgaaaccccgtctttactaaaaataccaaaaaaaaaaaaaattagctgggcatggtagcgggcgcctgtagtcccagctactcgggaggctgaggcaggagaacggcgtgaacccgggaggcggagcttgcagtgagccgagattgtgccactgcactccagcctaggcgacagagcaagactccgtctccaaaaaaaaaaaaaaagattgggctgctgtgactattctagtaggtgtctttggtgagcgcctacacgtgtttctctttttctctttagtatatgcccaggaggggaactgctggctcccagataccgtatgttcagggtcacacacacttccacagggttttccaaagcccttgtaccagcacgcactcccagcacctgtgtgactgctccagctgtcccacagtctcatcagttctattgctgatattttcattttagcttaagttatatttaataggaaaattaccgttgcctctgccccccgttcctgcctgtaggagtttctcgtagctgttgctacaggtggccacaaatctgtcacttaaacccacacaaattgatgtccttatggctttggagtcagaagtgtcaactgaaggtactagcagggctgtactgacctggtggcctcagggagcatctgtgctgcttctccaccttctagaggctgctgcatccctcgctccagccccttcctgacaccactcaccctcctacttctgttatcacatcctcaccttctctgtgttcagggctccctctgtctctctcttgcaagcacacttgggattccattgagggccacccacataacccaggagaatttctccacctcaatatccttaacaactgcagagcccttttgccataaaagttaccattcacgggttccagggattgtgacatgggtagctttaggagtgattattcctgcctgtctcccgctcaccagaacttggactttctctctcaacaggagccccctgtgtgggaatagcctgtctcaacgacgccctctataaggacctgcttcctcaaaggacctcatagtcgggtcctgcccctcagtgtccagtctgccttggctggaggggctgcaggggtgtgttggcgccacctggtggagacagggcatcacagcaggtgggagcccagtagaagcacaaccaaaacatgggtaatgtttaaaattttctggctaagcgctgtggctcacgcctgtaattccagcactttgggaggccgaggtgggtggatcacatgaggacgggagtttgagaccagcctggccaacatggtgaaacatcccctctactaaaaaatacagaaaaattagctggacatgtggcgcgctcctgtaatcccagctactcgagaggctgagacacgagaatcgcttcaaccccggaggggttgccgagatcgcgccactgcactccaggctgggcgatagagcgagactctgtctcaaaaaaaaaaaaagaagaggggaggcgaggggaggggaggggaaaagggggaatttgtttggagctgagacatccatcttctcctgacctcagatatttgcactcctggttatgaagccttcacacttggactgaatacaccaccagctttcccgatttccagcgtgcaaatggcagatcgtgagacttctcagcttccataattacatgagccaatttatatatataaattgggtcctccagaaaaacagaataaattatatatataattatacgcataacttaattaaattatacgtataacttagctatatatataatttattctgtttttctgaagaaccctactgacacaaatgttgagcatcttttcatgtgcttattggcttaataacttgtacatcttctttggggaaatgtctattcaagttctttgcccattttgtaactgaactattaatatttgtctttacattgttgagttgtaaaagttccttatatattctagatactagagccttatcagatatatttctgcaactattttctcctaatatataggttgtgtttttattttctttttctttttttttttattgagacagtctcactctgtcacccaggctggagtgcagtggcatgatcttggctcactgcagactcgacctgccaggctcaagcaattctcccacttcagcctcctgagtagctgaggttataggcacttgccatcgcacccagctaatttttgtattttttagtagagccgaggtttcgccatgttgcctaggttggtcttgaactccctgcctcaaagcgatctgtcagcctcagtctccctaagtgctggaagtacaggtgtgagccacagtgcccggccatctattttcaatagtgttttttgatgtacacaggtttggaattttgataatgttcaattcatccatttttttttttttttttttggttctttctactggaccaccactcttgagccctctaatccaacctccacgcggcagccagagggagctctctaaatgtaattactctttccctgctccacctgctcaaaacagtgtcacatttgtgatttaaaacagtatttctcaaacctaatttgcaaacaaagcaggtggaactcttcttgtatgcacagcatctgatttggttggtctggcatgggtctgggagtgagcacacctaccaagcggctgctggggtaacttgcgttttccactgatgatttcagcaatgtttccggtcccacatgctcctccagaaccttgtactcccccatgaaaaggtggagtccatttccccttcctttatttatttttttgagacgaagtttcactcttgttgcccaggctggagcgcaatggcgtgatctcagctcaccgcaacctccgcctcctgggttcaagcaatgcttctacctcagcctcccgagtagctgggattacaggtatgtgccaccacgcccagctaattttgtatttttagtagagacggggtttctccatgtcggccaggctggtctcaaactcccgacctcaggtgatccgcccgcctcagcctcccaaagtgctgggattacaggcgggagccaccgcgcccggctatttccccttcctttgaacctgatcaggacttgacgatggcatcaacatggtgagagtgaccctgcatggcttatgaggctgggttacacaaggcgatgttgcttctgactggctccctctcaggatacatgcccttggaacccatcctctaagctccttgggagcccaacttagcccatgtggagacaagacagggagagaaacagaggcacccccagccctcagccagcatcaaccgccagacaggagagcaaatgcgccaacaatgattccagctgaagcctcagacagcgtggagcagagatgagggatccctgcagattgcagatgcgtgagcaaaatgcatgctgtcactgttttgaaacaacaatgtctgggggctgtttgttatgcagcaatagacagctgtaacaatgctgttactgctgtattccatgaatgactgcactttgagtagcagggggctagatcactagataagccccatggcttctgtgtatgctatttttctacttttatatccttttcattcactttttttttttttttttttgagacagagtctcactctgttgcccaggtgggagtgcagtggtgcaatcttggcggactgcaacctccacttcccgggttcaagcaattattgtgcctcagcctcctgagtagctgcgactatagatgcacccccatgcctggctagtttccgtatttttagtagagacggggttttgccatgttggccaggctgatctcagactcctgacctcaggtgatccacccaccttggcctcccaaagtgctgggattacaggcgtgaaccactgcacccagcctcattcactttctttacttggctcatttttccttgttgcctcaattctcctctaagatcactttcctgacatttcagcctgggcctgttgccttctctgggtcccctccgcctcctgtgcctcccccatctcagccttgatccctcagattatacttcctctgtccccaccctgaccatcttggctgtccctggatagggatgggtatcttctcccactggtctgggagatctggaaggacaggcctggaaaagacttggtcactgctggaaggagctcagttagtgtggtgctgaggacagtacgggtgaggctggccccttcacccaaactcccactctcttccatagatttcacctctgtggcccaggccataggattagggcaactccccttaaacatcgagtccatcctccaagctgtccttttttttttttttttttttttttttgagacagagtctcgctctgttgcccaggctggagtgcagtggcgcgatctcggctcactgcaagctccacctccagggttcactccattctcctgcctcagcctcccgagtagctgggactacaggagcctgccaccacacccggctaattttttgtatttttagttgagacggggtttcaccgtgttagtcaggatggtctcgatctcctgacctcgtgatccgcccgcctcggcctcccaaagtgctgggattacaggcgtgagccatcgcgcccggcctcatgctgttcttgaatagtgagcacctgttacaagtcgccccaccagcctctcacttgtacccccctcatctctttctccccaagagacagaggaccctggcacttgtgaagcatgacccagaccctggggccatggcatccaacatcctcattccccatgacccctactgtctagatgtagctgccaagagacccccagactccccgggcctctgtctagagtgccaagacagagagagaatgccctgccgcttgcatgctttgtggggtgtccttcccccttccctggctgctaggcgtgacttcaacgttctccccaacccccaaacagcagcactgacaccagctgcagacctggctcaggttagctaatgaggaccaggctggggatggagcctgaacccctaaaccccagtcctgtaccccaccctaatcctggggtctccactggacaaaacgaagcagcttggtttttcgttgttattgtttttgagatagagtatctctctgtctcccaggttggagtgcagtggcgtgatctcagctcactgcagcctccgcctcccgggttcaagtgattcttgtgccgcagcctccccagtagctgggattacaggcgcgtgccaccacacccagctaatttttgtatttttagtagagacagggtttcaccatgttggccaggctggtctgaaactcctgacctcaagtgatttcccagcctcggcctcccaaagtggaagcggcttatttttaaggagaaaactcccgtggaaaggaatcagcacctcctctgtcaacatttcacttctctgaaaagactctcacttccaacagaaagtgctttgtaacacaacaatgaggctgggcgaggtggctcatgcctgtaatcccagcactttgggaagctgaggcgagtggatcacgaggtcagaagttcgagaccagcctgaccaatatggtgaaaccccgtctctactaaaaatacaaaaattagttccgtgtggtggcgtgagcctgtaatcccagctactcaggaggctgaggcaggagaatggcttgaacccaggagatggaggttgcaatgagccgagatcacgccactgcactccagcctgggcaacagagtgagactccgtctcaaaaaaaaaaaaaaaagaatgagaacatatggacacagggaggggaacaatacacacaaacaaaatttagaaacaggtgaaaataattttagtaatatttttactaatactgatatgctcaaaatattattatttcaataagtaatctaaaaattattgagatgtcttatgttcttttcatcatactaagcctttaatatttggtgtgtattttacactcacagcacatctcaatttgcagtccccatgtttcaagcactaaataaccatgtgtgtccggtggctaccatactggacagcgttgatctgaaatcgcatctgtatgcatcaccagcatatttgcagagatccccatctcagcagcacacctgaggctcatctgcgaaagcacctgcaacttctctacaacctcccacatcacctccaaacacatcctcatgtcatctgcaaacacacccatagctcacaggccaatgcctaaatatcattgcaggcaccttcagagaaagcacttactaaaggggtatacttgattccacatctgctttgacctgcaaatctcccttctcctttacatacatttgcatctcatttgtatgtcaatctaaatccactggcagagcctcagatcatcatctcaaagtcaggtggatgtggggctgggcaggcctccaggtgttcctcctcctgcttcctctggggctcttgatcctcctcctcttccttgctgctctcctcctcctcctccaatatggtgaccagttcctcccgcagcgcccccatctccagccccaggctgcacagctgtcccagcagctggacatccactcggcgcaggttcccctgccagtaggaaggggacgtcacagggatgccaccccagagagcaaggggtctctccaggacctgggtgagagcaggtcccaactcatgtcctggccacagcgcctgggcagggtcctcactgtgcccatggaccctaactgccttcctgcttctcagagtgtctcttgatctctaactcttctctttgtctctccatttcattgtccctgacttctctctctctgtctcctccctctcttatctatatctgtccctgtttccctttgtctctgtccccatttattttttgtctttccatgcccctgtctctctgtctttatgtgttgccatttctctgcccctgcctttggctctctttctctcgcttgccctctctctgccctccccaactttctcaaattcagtctgtctctccatctctgttcctgctctccgtctctgcttcccacctctgtccctctcttttgggatctccctgtccccacctctgttcccgtccctcactctatgtctgtctctcggtgtctgtacatgcctctcatgtctctgcttctatctctcagattctgtttttcgatctctggccttctctatttttgttcatttccattcattctcatttcctctctttctctttcccttccaaacccctcactcaccagctcctccctgatccacagcagactatcgcaggcacctccagtgtctgcccctgcagtcctgagggtctgaccagggatttccactggggagacctccctcagggcctgggggggtgggcccagccccggaggcaccagtccagcctgattcagctgcctccacagttccatcgtctctgagctatggctgcaaggagcaggaagtagcaaggtccagggtggcctggtcccctggggagctgtgtgcgtggtggagagtaaagggcagagggagtgggatgggggttcctgggaaaggtatcccaaagtccactcttcagagagaatcagctggccttgtgcttttctttttccttctgaagtctaacctcaactctgctcacagggttcaaacatagcctcttgcagaggtctaactccacccttccctgcctgtctcaggcctgacccctcaggggcgctcagtgtctgtagatgcctggcaccctctgtccttccacctgccccccaccaccacttctccagcctctcctcagcctccatttgacctctggcttgcccatagcttggtccttgcttgtcctcttggcacgggtcatcctagggctttcccaccagtgtgcctttgggggcaggaatggctcccaggggcaccaagacagcaatcccttagctggagtgcctgtgtccaggctgctggcctagggccaagcagccaattctgctgaccctggacttgcctatgggtatattatccctgttgagggtgagggcttctgctgtggaaaagtctgggaagcactgcaggcctctctcggccttggacccttccttcagacccaaggtgcatatatatacatatatataatggtagatcacgaggtcaggagatcaagaccatcctggccacatggtgaaaccccgtctctagtaaaacacaaaaaattagccgggcatgctgccgcgtgcctgtagtcccagctactcgggaggctgaggcaggagaatggtgtgaacccaggaggtggaggttgcagtaagccaagatcacgccactgcattccagcctggcgacagagcaagactccatcttaaaataaacaaatgaacaatatatatatatatgtattttgttttttgagacagagtctcgctctgtcatccaggctggactgcagtggtgcaatcttggctcactgcaacctccgcctcccgggttcaagcgattcccctgcctcagcctcctgaacagctggggttacaggtgcacgccaccacacctggcgaatttttgtatgtttagtggagacggggtttcaccatgttagccaggctggtctcaaacccctgacctcaggtgatctgcccacctcggcctcccaaagtgctgggattacaggcgtgagccaacgcgcccagccccaagtcccttttaccatagaaagtaacatagtcacagtgcccagggattcacaggtatggggagagggttcgttattcagctgccacacccaccttcctaaacctgctgcccttccagtttcctcacgtgcacagccacgcccgtctgcttttagtttctcaatctgttggcttaaccttcaaaacaggcccaggatttgagcacttctcaccattccctctgccccatccccattcatctcttgcctagactgctacagcagcctcttttactggtcccctgcatccacccttgccctctaaggcaagggtccccagtccctgggccaaggaccagtaccagcccctcgcctgctaggaactgggccgcacagcaagagatgagcagcgggtaagtgagcattaccgcctgagctccgcctcctgtcacatcagcagtggcattagattctcataggaggcaaaccctattgtgaactgtgcgtgcgggggatctaggttgcctgctccttatgagaatctaatgcctgatgatctcaggtggaacagtttcatcccaaaaccatccccaccccacccccgacccccagtctatggaaaaattgtcctccacgaaaccagtccctggtaacaaaacggttagggaccgctgctctaaggtacattctccacctggcagaaataatctttacaaaatgtaaatccgattttgacactcccttcttcccactgtgaatagaataaaaccctaccaggcctgcaccgtcagcccctgcccacctctcaacccagtctcctatctctgtctgcaagctggttcccacctcaaggcctctctgctctagaggctacctctccctgcagcgcttttcccctagatctttgaatggctctttccttatcattcacttctacttcaatgtcacctcttcagagaggcctttgctgatggccctacacccagtcacttttttttatctgcttctcatcaaaattgccttgctgattcctttgtttcttattcatcctctcccacatccatcctctcccagcccagaatgttgacttcctgagagagggactgggtctgtcctgctcaccatggtaacctcggcatctagaacagtgcctgccatcacgtggtaggtgctcagtaaatattcttggaactaatgaatgaataattctatccacaagacttcacaatggctcttcatgctgcgatctagctttcaactccaaactggtcttgagatctcacctcagtctctaaccttgacatctaacctcttcacccactctcttacctgaccctaatttttaaaaatgacgtggtcagcttttcagccccctcattccctgtttttaggaggtagtgagtggaagctggaagaataagaaagcttggggagactgcaattgcagtcaggaaagaaaggtactctgccgggaagaacaccccatcttctcctagggaaagattgtggagtcctggggtttgttttgtttttcaattttttgttttaagagacagcgtctcgctctgtcacccaggctggagtgcagtggcgcaatcacagctcactgcaacttcgacctccccggctcaagtgatccccccgcctcagcctcgtgagtagctgggaccacaggcgtgcaccaccacgcccggctaacattttattttttgtggatataaggttgccctatttctttgtggagataaaggctcccctatgttgcccaggctggtctcgaactcctggcttcaagcgatgctttcgcctcggcctccacaaagtgctgggttcacaggtgcgtgagcccgacctgtgtctcgttttgaagctcagggagagggcgctgtgagcaatccctaaaccctttaagagtaaaaagtgcgtgcacctttaagaggacggttagaaaacgcggggcgtggccacaggagaataagttcgcgctgaaccaggagcgtgggataagaccggccccttccggttacgaaaccttagcaagatggcggctccctgggcgtccctgcgcctggtcgcccccatgtggaatgggcgtatcaggggcatccatcgcctgggtgcggcagtggccccagagggcaatcagaagaagaaaaggacaatactccagttcctgaccaactatttctacgatgtggaggctctgagggattacttgctccaaagggagatgtacaaggtgcatgagaaaaatcgatcttacacctggctggagaagcaacatggtccatacggcgcaggtgcctttttcatcctgaagcagggaggcgcagtcaagtttcgagacaaggagtggatcaggccagataagtatggccatttctctcaggagttctggaatttctgtgaagtgcctgtcgaagctgtggatgccggtgactgtgacatcaactacgagggcctggataacctccgaacctccgcaggctggacatctcggacctccctgccgtgtccaaccctggcctcactcagatattggtggaggagatgctgcccaattgcgaggttgtgggagtcgactgggctgagggcctgaagtcagggccggaggagcagcctcgggacacagccagccctgtccctgcctagcctttagccctgtccccactcacgtggcttctcagcgggctgcatggaatgtctggtagctcaccacacttctggcttccatttgtcttcactcaacgtcagggtgggggagtggtgctggccaatcacaggagagagcgtgagttcccagtatttattcctggctgcccttggctaaaggtcacagctcctgtcaccctgtcaggcagccctttccatgcccctgttcaggcctggggaggtaaaggctcaggctgttagtagccgcagagagccacactcaccttgtcaggagactcttctcaaactgtccttatgtgagtgcactgccatttcttgcagggaccctgactgacacaggggctactactgacactttacagggatggttctcccccgtgcagggccgctgtgcccactgcaggacatgcagcatccttcgccccactccactcactaaaggccagcgcaccccaggccccatagtattgctggttatggatttattgactttatgttccaaattcagctttttcagttggctgttttttgaaaggggataagctttgtcagtagagggcaccgaacaggcattataggaggaaaggcgcctccttcgtggttcttgttggcctccactgaggcacctctctgggaataacgttccccagcaccccaaatggatttccagtcaattcagaagcattttaccagtgaagccctcattattccagttcactgttaaagccagtaattctctatattaaactttccctgttcggtttatactccggagtataaaccgaacaggctatcagcacccctactagttctaaccacatgactcctcccccttatactaatagctagccaatcccacctatcaaaagaaaccacaacccgaaaaaaactatatattaccatactaatcctactacaactattcctaattataaccttcaccgccacc

SEQ ID NO: 735312 - DNA, 188094 bp, Homo sapiens
ctccaaggctgagggatgaggagacctgctgaggacccagggccttatctttccatcccactccataggtcccagtattgactgatgctgtcttcacctcctagcctcacttttaaccttctggcacccgcccaccactgtccagttcactattgaagccctgccgtccagtgctgcagagggaaaggatgttcttctactggcctgcaatatttcagaaactattcaagcctattattggcacaaggggaaaacggcagaagggagccctctcattgctggttatataacagacattcaagcaaatatcccaggggccgcatacagtggtcgagagacagtataccccaatggatccctgctgttccaaaacatcaccctggaggacgcaggatcctacaccctacgaaccataaatgccagttacgactctgaccaagcaactggccagctccacgtacaccgtgagtgattcccccatacctctgggtgctggcggtcagttctgcttcacacacatgagattgtcaggcctgggctgtgcctgcatccccctctgcattttgtcccgtgttgagatttgggcatttagtgcaggacacacacatggtaggtaaacttcaacagatcagaattcctttcctgcatccaggccctgcagacactgatggcgggggcgggggggcctcagcagggggaggtcagtctcagccaagcaccccatgccctccccatgaacctgaccctgagaaagaccctggagaactgggtcagggcctggcctgagggcgtcctgggaacctcacaaaagcccagcctcaggactcctgactccgtgtgaccccgggaagcctgtgtcagggctggggtgtggtctcctgggcagggcttactgggagcaaggatttaccagatgtctgcgggctgtggttcctgaagcttctcatcagtgagggctcagctcccagagtctcatctagacaaggacagagcctaccactttccctgggactcagcctggagagggcagggggacaggattactagggcattggccccctgaatgaggagcttaagagatgcccttgggcagtcagtggcccaggggtaggaacagaggggagaaaatgttcctggcagcttcttgtccaccggggatcatgcccaggggtgctctcccatggaggcaaataacagatgctgttgatgtgaacacctcctctgtgccaagcttcatgtcagatcctgtgaataatttaaagttcattcacagacaaagtggcaagcctcagaccattttccatttacatattgtatggaggggaaactgaggcacagagagatacagacaccggccacggtgggcagatcgcagctggcagagtcacatgagggctgtctgcagctgctgccacgtcctctccttcatccctggtgccttactaggtgtctgtggaccttagaacagccactggttcggatgttttcttcttaggtgtctacagctcggagggggagattctggtctggagagttatgagtaaatacagaattaatcagttttttcttaactaaatcacctgcctcaacaatcagtcagtgctggggaagttcaggcctcctcgctcaggtccacaccccgcatctctggacatgaaatggcttcgtgtgttttctgatgtgtgggtatcattccaacaggaggataaaggggaggactttgctttctctccccattcacaccctgcaccagccagggcccagtgtgagacacatactccgtagttctctcatgaaggagggagggaatgaatgaaggaatgatctataacctcttcagagacagagacctggatacaagatcctaggaggttctgggcccaacgtgagacacacactctgtagttctcttatgaaggagggagggattgaatgtaggaatgatctataacctcttcagagacagagatgtggatacaagatcctaggaggttctggccacacctgttttctgtccctctagagcctaagacccatgtctcattcatctggcccgtttctcctaaatctgcccctgggagctgagtctcatctgaccctggggctgcagggctgtgggaaggttttcaggggagggatcaggcttgcgggtagtcccacacgtttgccttacaccctggagctctacctggttctcactatgaatatcccataataatcccccctatcctttctggggagtagaaaaaaagtaaatatttaaaaatatgccagagcatctgttcttcttagcaagttcagatagttattagttagcaggaataaatcgttattttaccagagcctcacctgctgggggtttatgggagcctaactgactgaggggggtgggaaatatccaactccagccccctctagccatcatgtcccacctaaaggagagaaaaaactgagaggcacttgtgacattcacagcccagggcacagactctatccaggaccacagaacccctccctccccccactcaccaccgcatcactgaacgcctgctcacccaagttcctgttgcccagtacatcatgtcctggctttcaacaaaaactacaagacagactagaggcaaaaaaaaaaaaaaaaaaaatgcagttcgaaagacagaacaagcatcagaaccagatgcagatgtggcagggatgtggcagggatgttgaaattatcagaccaggaatttaaaacaactctggggccaggagcggtggctcatgcctgtaatcccagcatttgggaggccgaggcaggcagatcacctgaggtcaggagttcgataccagcctggccaacatggcaaaaccccgtctctactaaaaatacaaaaaattaggcaggcatggtggtgggtgcctgtaatcctagatactcggaaggctgaggcaggagaattgcttgaacctgtgaagcggaggttgcggtgagcctagattgtgccactgcactccagcctgggcaacagagcgagattccatctctaaaacaaacaaacaaaaaacaatactggctaatatgctaaaggctgcaatggaaagcatagacaatgtgcagaacagacggatgctgtgagcagagagatggacaggctaagaaagaataacaacagctactatatctatctatctatctatctatctatctatctatctatctatctatctatatatatgtatatatatgctagagatcaaactcactgtaacacctggatctcagagtggttgtgaggatgtttattaggagattaaagagattaaagcagagttatacacagggcgagagctcaactgatgctatcaactagtattcttatttttttgatgttgttattggcaataaaatcaggaacaatgcagtaaaaatttggttttatcatgtacgagttctgtgaccttccttgacttactgaggtactgtaagtctcagattctaactctgcagatggcggtgatgcccctctccctcaaggtgatgtgaggatgagatgagctgtaggtaggttggtgcccactgtgcctggcacatggaaggcccctgaaaatagtcaatgaacatcatccccgctcatcagcatggagttgacagtgagggctcgctctctgtgacaatcatggaatggaaaagaagaaacaagaggaagactgggcgcagtggctcatgcctgtaatcccagcactttgggaggccgaggcgggcagatcatctgaggtcaggagttcaagaccagcctggacaacatggcgaaatttcatctctactaaaaatataaaaattagcctggcatggtggcacaaacctgtaatcccagctacttgggaggctgaggcaagagaatcgcttgaacttgggagatggaggttgcagtgagccgagattgcgtcagtgcactccagtctgggtgacagagcaagactccatccaaaaaaaaaagaaaaagaaaaaagcaacagagggaagaggtgtgacatgagaggaagaagggatttaaaggtacaggagcagggcgaggtgcaagcacctgtgggagaatgtaggagttggtacatcccagtgtgtcaagtctgagacacagaaaatggtgcaaccgtggagagcaagggagtcagctatgaggacagcccaacagaccacactcaggctctggagcatttccttcctccctgactatgcccctgccctgcaatgccccttatggtttcccttggaacaaacttgggccttgtcccctttgccttcccctttctgcagaaaacaacgtcccaggccttcctgtgggggccgtcgctggcatcgtgactggggtcctggttggggtggctctggtggccgccctggtgtgttttctgcttctctccaggactggaaggtaccgcagcttttccccagcctcctcccacccctaggctgaccccagtcagggaggagggagaccccgccctgtattcagggccaggctttccgcatcctcccaaggaatccttccctctcattccatggctcctcccttgccagctgctgatcctaggctgcctcttcctttatgaatgtggcacagttaaggttgcacccctgagtgctgtcctagttccctaacacagcaaagccacagctgcctggagggaggaagggagggagggagggagggagataagacgggagtgctcagaacctggtaccttctgctgttcattgaatttacccacccagtgaggagggatttgcaggcttgagatccatggtgggggtcctgggcatggtcacgcagtggggagtggcaaagcctggacaggctgggtagggtcagcaccccatcgtgattgatgtccctgaggtgtgagatgggagaacctggacctcaggacctgctgtcctttatgtctcttgccaaggggtggagagagagaggacaaggccattgccccatttcagcatctccaggcctgaaaggagggtctggccatggcagggatactgagttctgggagaatatgatacatgctccttgcctccccatgcccccagctcccccagtgtcctgcacacacagccggccctgctttccctctggggccttgacccttcctctcaggcaaacgcaggtggtctgattccctccctgagtcctcagtccctttcctgggtccctgggtcaatgttctcctcacccggcatctgcctgggggggtccttcctctctggccaggacagacgtgactgcttaaggcctatcctcagctccccgtcctcggccgctcctaccacgaaactgatggagacaggaggccttcactccagtccttgaaaatggagtcccttccttgtcctttattctgcccctaaacctgtgatttctccctgcaccctcatgaataatcctgacctttcctagggccagcatccagcgtgacctcagggagcagccgcccccagcctccacccctggtgagtgtcccttcagcccaggtgtgggagcccctaggcctgccctacggtgtccactcctgccagtcaccccctgggggcctctgaccctttctttggggctgcaaggaggatgtcaggaaacatgacacaggggaccccgactgtcttgttcagactgatctgtgggctctgggtcgtgggtcacctcctcgacctcagctgctcaggtctcccctgggaagaggctccctctccctgattctctgggagctgaggacccctacactctcctgcaggaggggcccaggctctcctcccaccctgctgctcactcctgtctctgtccccaggccatggtccctctcacagatccaccttctcggtaagcctgttccctccccagcccttttctactggggtcccaacagtgcaggctcagggcagggggaccatcaaccccacagcacagcactgacccacctttccccagaacagtcaggtcaaagtgagtgcctccagccaggatccgggcctctctacagggccaggaccacccacgccatgtgctgacccctccccgggaccctctacacctgaggagaaccctggagtccagcaggtgcagaatggacactgggaccatcagtcagaggcccacattaacaagggtgcggggtgggcccagccaggacaggggtcagggtgttgtgtccacactgggaggctgagctcaggggcagagctggtcaatcctgaggggaaatgagtggaagtggaggcagggaagtaagtcctggccgatcagagacaggaaccttccaggctgggcttccgtgaccctccctccctgtcccctgacatctcctctctcccctgcccaggcccctctacccagccccagaacagccactcccatctatgaggtgagtgtgggccatggatgttctggtcccgcaggctccaggggacccaggatctgcccccaccagcacctggctgagctcagattcaggaaaatgcagtgaaaatgagaacaggtggtggtgagcagaggagggaggggcctgggaacagggaccccctgagcacagccaggttcagccccagagaagccctgggtgggcccagagcctgggagatgccagacactgttctgagaaggctacaggggttgaggcctcttctctgtttttacaggaattgctatactctgatgcaaacatttactgccagatcgaccacaaagcagatgtggtctcttaggttcctctgggagctgctcttgtgggttgatggagcgtccccaaagctcccagccctggggacggggaaggacatggagcctgagccagagaaccagctctgagtcctgaggagacacaggcctggggacagggagggatgggagtccctgctgaatatctggagaccctgacaggttgccctgggctctgggtgggccgggacaaaggcctctcatcaccacaggaagcgggggcttgcaaggaaagtgaatgggcctgtggcccacccggggtcaccaggaaaggatctgaataaagaggacccttcctctcattggctctttttctgctcacgggaacttagcagaaactcacctgaaactccgtgtccattctctcccgggtcacacagggaaaatatctccaccttgtctcaaccacagtctctcttccctgggaggcagaaataggggttgggagtcaggctggggtgggccctacacaggaaagggcaagattcacatgagccctgcccagccagccgagcgctcagctgtcctcacactaccccagggaccaaggccatgcacagccccagcctgggtccctctgtgaatgcatgtggggtctcaggagcacagaagatggggccatctgatgtccacaaaaggtgagcaatgcgggagcaaccatgggtggtataggttgcggctgtggcccctacgcagcctccagtgtcctgacccctgctgccctcttcacccaggccctggaggcccagtctatcactgtcctccacaaatgaacttacctgtccccaaatccaggatcctgtgtgcttatacctggccactaggttctcctctgtcccagtggctactgctcaggacatctttatccctggtggggcacagagaggggctgtcagagcaaccaagattaatacagacgcataattcagtccttgagcactacccaggactctggcccctcattgctcatcagttcccactttaccccctggcatggatctcactgagcaagccaactctttacacaggagcatccaggtcagaggtgcaggactcccccatctaaagctcatgcaggctcccatggcgatgggacaacctgtctgctcctctccctggcccacagccctatctcgcctgcagctcctccacacacctgggacagcagttctcagcccttccctgagggcccctggaagggtgatgatctcatataggttcacttgaaccaggtgccaccttcccacaagtgagctggtgcctgcactaaagcacagagccacagttcccaagagtgttctgccactgccacaggtcccaagagtgttctgccactgccacaggttgttcgtcctgagatgagaggtaagaaaacaacccgcaatgggttgttttatatcgggatttgcatcaggatttagctctaaatgacccctgatcccacctgcacacagcgtcagatgagacaaggtgaggcctctttagttttctgttgaggctgtgacaaattaccacaagcttagtgacatagaaacctgaaccaaagtgcccacatggctgtgttctttctagaggctccagggaagagtgcatttcctctccttttccacctcctagaggcctcctgcaaccttggctgtgtcctctttctccatcttcaaagccagcagcacagcatcttgaaactattctgtgccctgcttccatccccacatctccacctcctcccacctccctctctcacttaaaaggaaggagccttgtggttattttggacgcacctgggataaaccacaacaacctccccatctcatgatccttcctttaatctgtaaagtgtcctttaccacgtgacatgtccacagatctggggatgaggatgtacacatctttgagaggcccttgttctgtccatcactcctctcaaggccatcttctcatcatcgttcactacaaactacacatgggcacctggatgggttcatcatgactgtggcgtcagttcctgcattaacatccccagcaccctccagatcctgagagagggagacggagggctctccatgcccctagtacctctccaccttcttcttggtgacatgcttagttgctaagaataacagaaagcggaggtgactgaaagatcacaactcaccggcccttcaatagttcgtggacatcagcaccacggacagtgactcagtgaggctaatttccaggtggcagcagggagcatgcagataggagggaactgcaggaaaagctgcccattctattctatatgagaaagagtgtaagaaagaggaagctattacagggataatgctattcttctctaatccataaattgcgaaacctttgcatgtctggatatcatggtttttagcacatctgctgccactccctgcagggctgattgctgcatccaggatgtggtctcttggggggctcacagcctgctttggcctcatggtgagtctccctgcccctgacactcaggccactgtctctgcctacaacatggtgggaaccttccatgattaacgtctgattctctgtgcctgacctttgaagcacatccatcactcagcctggagcatccgctgagctcagcatcctgctcctccatccccagctgagcccttgaggagatgcttgagaggatctcctgggctcctctgtgagctcctccaggctgagccttgtgcttggtgtcagaggcctttgccatctgcttgttctttccataggcaaataatcctcctcagggacaagtggggcctgaagatctgtctgaatatctatctatctatctatctatctatctatctatctatctatctatcatctatctatatgtatgtatatatgagaatgctttattaggcaaaactgcatactatgaacatgctttaaaatgcaacaggatgagatgtgaagacataaagaacaagtgtgtagtgacacatggctatcagaacacactgaagaatccacaccgcggccgagagcagtggctcacgcctgtagtcccagcacttttggaggctgaggcaggcagatcacttgaggacaggtgttcgagaccagcctgaccaacatggtgaaaccccatctctactaaaaatacaaaaaatttagccgggcctggtggctcatgcctgtagtcctggctgttcgggaggctgaggcaggagaattgcctgaacctgggagacacaagttgcagtgagctgagatcgcaccactgcactccagcctgggagatagagtgaggctccatctaaaaacaaaacaaaacaaaaagaatccacactgcttccccgcttcactttacccagaaaaggaatgttctaggccacttcctcttcagcacacatccccagggaactaaaataggttcacagtcacccccatcttcctcattcccatcacctcttacccacagaggcatctctggtcctacagatccagccctgccttcaagaggcacaggtccaacccatccagtgtccctgctagtcacacacagcactcagggtacaatggagggcttctgtgctttggatgggaacaaaccccacctcacattcccacacctgagaagccaccagggtcctctctgtcctgtcctcacactcaatgtctgtcctgggtcacccttgtcatctctcctggaaataggcatggctcctgacaggtaggattgaggctttgtcttttcaggagtccctcccactctgagcacatgaaactgctcagctccatgcaaccctctctcaccaggggccttgttctctgggtccctgaatacctgggtccatgccatgtacattttaagaaaaatgacagtgactctcaccctgacatcctcacccaaggcacgtgtctgacaagaatcaccaggtgagatacctgtggctccacacacctgaggcttcactgcgcaggggtgtcctcatccctctcctcccacccctagggacagtaagcaccacaggctgccttggaccaccagctccccctcccagacacagcctcagatctatactgacatgctacatggagaggctctgatgaacagcaggtattaggaaatcccaccgaaccaggtgccacttgcggccccactcctcctcatatctgtgactgggacagacacacataacacacctctgttcaccgcccagcccccaaggtcaatcacagtctgcttctcccctagatccactgctccccatgtcttccgtcctcagctgcatcctgggtggcctccttgctgttcttgtaccccagaggcaggttccaacctttgtgatgttgcctgcaatgcccaaactttcccttccccttccccttcccttttcccctcccccttcccctccccttcccctccccacccctatcccttcgtcttcccttgtcttcccttcccttccctataaagccaaacatacccatccacctaccttgtggtcaaagtcatcagcctcctgctccactcagtgttctctgaccctgcatatggaggtggtggcccctcctagaacacccaccactcactgtcagccttgcgtggtaatcacagattttgcaggggttacctgtgttcaggtgtgtcacctgtggaaccagaactcttggaaggactggcagagggagctgcttaggatatctcagggctcctggcatctggtctaccacagggctattaacaacagcacttagggacaaggtggaggatggacggttaagagggtaaatatggatgatgtgtgggcaaagaataggacacaggaacacatgcagtactcaaataattatgccaagaaaggtgaggacatggagatggacattcccatatacttctgatgggactgcagtttagtccctacagcaacattgacctcatcatgtttaacgcgcacacgctctgaccactatcctacttctgaaggcctccctgtgctgtgagctctgagaaggccaagcttgcctgttctgtctctgctaaagccagagaccagccaatagcccagcacagggtacttcataaatacatgttgaaggaatgagctccaggaacagtactccacatggtagagatgtgtgtatgaggatgttcactgcagaaggtcatgtcaatgtgacaagtgacgagcagcctcaaatccagcaacaggggtgtgggtaaaagatcatagtgtagccatgcaatggaaccaatgaaaaaaccacaattagagcaaatccacatgtattaataaaggaggtgccctccatacatgctgcacctaacagaatgttgccaaataagaatgaaaaatgatgatatttgggctgtaaaaactagaagtcagctaaataagaatgcatcgaaagtatttgtgaatgcttacaattttataatgccttggcatccgttttggatggaagttggactttctcataccagaagcagggctcagtcacctttgaaatagtttccagttctccacctccttccagttcctcagtgtgattgatcagatatctgatttatacaactgcctcctggtgacctcctccctatgggacttccggatacagcccgtatgactgccccactgaccccacaccctgcctgctgcagtgaccacctctaattacctggatctcatgtctgcttgcattaaatccaccaattaaaactccctgaggacaatctgtttgaataatattctgtaccctaataaaggccttgacccatgggttccccctctgtcctccccatactgcccctgacctctgtgtgtgtgtgtgggtgtgggtgtatgtgtgtgtgtgtgtgtgtgtcctccagacagggcctgtatcccccaggacctgtaagtaataaatctttattttcatcttatgtctctcgcaatcattggcaagagctctgcatcttaaagatcgcaaatttaagaaattggtgtagtcggcacaatagagtacctcttctgtttagcacaagatatctcggagctgctgaggcttttaacatcctcgccggtgtggctgcctcactggtgaggccgttctgttcagtgcaattcagttgctccactgtgtgctgctgtgttgctgctgtagagtgctgccatgttgttctccccaaattgttaccgagtaggaacctgtaatgtgctcccaaggtggtctaccccatgagaagggggattctccatctagggcaagggctaggtgtgtttctggaatcctaatagggaaggcatccacagagggtgaactccactcctccttagagtgaggagtgacatttcccatttattttccccatggaggtgccatgtattgactttttctttcactgtcccaaggttgagccaaggtgagctatggagaccagggcaagataccatttctgttagcaaagcaaatgggtgacaacgtgtggagaagctgtggttctcctgatggatatagcagagtgccatttagtaaaatcttgtcaggaggctgcccctggttagaccggcagtgtctgtagtcactaaggtggatgcgaattttaggccctgggccatggataatccctgcagacacagccgtggcttcatgtgatggggcaatcccgggctagtggctcccttgtttctgcatttcttgctgtggttgcacaatcaacacctcaggggttgattgggtcaccttggaaagagaaacagctgcctaggaggctggtgcacatggaggccaccctcaattttattctgctaacaagttgtaagattaaaacaacagggggctttgggtaccatcaggaacttgtcaagtaaacatccaaagacagaaagaagaaaaagaaaaagacattaaccgtctagaaatacaagccattttaaagattttgcttaaaagatgcgcttgggctgggagcggtggctcacacctgtaatcccagcactttgggaggccaaggtgggtggatcgactgaggtcaggagttcaagaccagcctgaccaacatggtgaaacctcgcctctactaaaaatacaaaaaattagcagggcatggtggcaggtgcctgtaatcccagctacttgggtggagaatcgcttgaacccgggaggcagagacggcagtgagccaagatcgcaccactgtactccagtctgggcgacagagtgagacttcatctcaaaaaaaaaaaaaaaaaaaaaaaaaagacgggcttgtttcgtcgttgtggagtcatcccagagagaggctactccctagagtcactgaccacctttcctcctccatcttttcctcttatcattctagagacagaaaacaagaatctcagctttaggtggctaacctcaccccccaagaaaagaaactaccactttgattgactacaaatccaagaaaaataaaagagaaactttaaaaagtactgagcaaaccacaggtctagcaaacataatgctagccctaggttacttattcatttacaacaaacccctagatataggaggaaaaaataaaaggtaattaaatatatacacatacaatattttaatataaatatataataaatagttaaattatgtatgtataatatgtaactaaatcaaagtaaaatttcatactttgattctattggaaattcaaaattcatttattaacttatatattaaggaatttatgtaaaaaaagatttttaaaagggcaccaatttgcttttgtgtctctacaacataggatctaatttaactttacatttgctaaatacactaattgacaaatattcatggatttaatcaatactggggctcaaattgtagccacacgtgggaatcccataaatttaaacactctgtccctattatcttgagaagaaaactaaatataaaattgaaaaaaacaggtatgtctcaatttacctgtaactttgcctaaatttcccggagtcatatacccattgctgtaaaacattctctattggacataggtgctctgagacaataaataaaatagaagtgtttttggtacttagacattggcttgacaaaatgggatcccatgaaacctcagttaagatagtgaatacggcccaatgtgagttgaaatggggcctttaaggattaaaacttattacatgaaacctagtaagtaatggggtgattatccatactgcttctccatttcatagcccaattttgacagttgtcaaatctggaaaaaacaaacaaacaaacaaaaaaacccctgggaatctgttgcctcacagagacacaaagtagacatcaaaattgtatatctcagttccagttccaaaatggtggcatagaagcaagctggctttactccttcacacagaaaaccaaaaacaaatatacagcaccaaaattattaccagatatattccagaactcaaatatgaaaatgaaacagttttcagagccacagagaagtgaaaaaaactcccgacagatgacaaaagaatcagatttccccatctgtaatgtccctccctgccccattctgcctggtaccaggtgtgtggaaaattttaccccaactcatggtttctacactgggaaatgtaagatcaatgcgggcaaccagtttctgcacaatcctgggttccctgtccctgccttaacccacaagaagcattgtgagtgcccgaagggagaaatttccctgaggacagtcaaagagtggggaggcaggactaccatctccttccctggaaactctgctgtgtaactcagccaagggagacatgaaatcagactggtgtttcagcagctccatgttgtagtaggtttgtttcacaggtatcctgggcatggacatctagccagctttcccacactgccaggatatcccctttgggacctccctcagttaggaagggcacactctgatcatttactagggccaaggtaaaccctaaaggtaacttagagatgaaaaggaggtagtgacctagcagtaaagaactctaagaaaatctatccaataaaaatcaaaacaagccagacaaagactaaaataaataatgaatccttcaatgtaaagacctggacttacatccacaagaaacagtaagcaggtaaccatgatctccccacatggacaaagtgaggaacaagtgactgatcctgatgagatggtgatgtgtgagctctctaatcaagaattcaaaactgcagttttaaggaaactcaatgatcttcaagaaaacatggaaaagcagttcagaaatttatcagagaaatttaacgaagggattgaaataatttaaagaaaacaaacaggaatcttggaattgagaaatatatttgctgaacaggaaaatttattagagtctctcaacagcagaatggatcagaggaaagaatcaacccaaataagactcccccaaggcataaaataatcgaattctcaaaagtcaagggcaaagagaagattttaaaacagaaagagaaaagaagcaaatggcataaagaagctccaattctgtggcaacagattttcagtggaaatcatacagaccaggagggagtgacatgacattctcaaaatgctgaaaaaatattgacatttgagaatactttatccagtgaagttatccttcaatataaaggagagagaaagtttcctagacaaacaaaagctgagataattcacaccatcagactagtcttcctgtaaatactaaagggtaaatactaaatacttcaatgtgaaagtaaaaaaaaaaacactaacatgcaaaacaaccacaacaacaataacaacatttgaaggtataaaatccactggtgaaattaagtacgtagacaaacccagaatactcaaatagtaattgtggaaagtaatccaatcataactctagcatgagtctcaaaatataaatctatcaaaaacaataatacattttaggaggccaaggttggcagattccttgaggtcaagagttcaagaccagcctggtcaaaatggtgaaaccccatctctaccaaaaaatacaaaaatttgcagggtatggtagcacatgcctgtcgtttcagctatttgggaggctgaggcaggagaattgcttgaacccaggaggtggaggttgcagtgagctgagattgcactactgcactccagcctgggtgacagagggagactctgtcttaaaaaaaaatagctacctgtttggagaaaggtaatataaaatatgtaaatagagacaaagtcaaaatttgcaaaggatgaaattaaagagtagagtttttttggggggttttctgtttctattattttatttgtgatctaagataagttgttaccttttcttctcttgaagatactttgttatatctatgtttttggaagtcttatggtaactgcaacgcaaaaaatctatgatagatccactgaaaataaaaaacaatgacttaaaacatactaccagagacaatcaaccacaaggaagacagtaaaaaatgaagaaaggaagaggggagttacaaaacaaccagaaaacaggcaacaaagtggcagtagtaagttcttacttaaaaatattgaacactgaatataaatggactctattctccaattaaaaggcatagagtggctgaatgctgcctatatgctgcctacaagaaaccacttcatgtaaaaagatacaaatagactgaaagtgaagggggtggaaaaagatatttcatgcaagtggaaaccaaaagagagcaggagtagctatactgatatgagataaactacaaatcaaagactataaaaagagacaaagaaagtcactatgtaatgataaagcgctcagttcagcaagaggagatgccaattataaatatctatgcatccaacacttgagctcccaagtctcccaagtatttaaagcaaacaatagtggatctaaaaggagagatagactgaatacaatattaattaggggactttaacaccctgctctcagcaatggccagatctttcagacagaaaatcaacaaggaaacttcaaagttaaactacacactagatcaaataggcctaactggcatttacgggacatttcactaactatctaactgttacagaattcacattattttcatcagcacatagaacattcttcagaacagaccacatcttaagtcccaaaaccagtcagaataaattcaaaaaagtttatatcacatcaagcatttgttctgaccacaatggaataaaactacaataaatgaataactttctggacacatacaacctaccaagatggaagcatgaaaaggcagaaaaacccaacaaaccaacatgaaactgtaacaaaaggaaaacccaggaccgaatgacttcactgctgaattctaccaaacatttaataagaactaaaaccaattctactcaaaatgctttaaaaaattgaagaggatggaacactttcaaactcattctacaaggtcagcattatcctgataccaaaaccagacaaggacaggacaaaaacaaacaaacaaacaaacaaacaaacaaacaaaaaaacactacaggattgcttgaggccaggagtttgagatcagcctgggcaacatagtcagaaccaatctcttaaaaaaaaaaaaaaagaaaaaaattagccaggcatggtggcatgtgcctttagtcctagctactcgggaggctgaggtgagaggaccaattgagcccaggaggttgaggccgcagtgagccatgtttgtgtcactgtactccagcctggggaacagagcaagatgctctctcaaaaacaaaaagcaagctgggtgtggtggctcctgcctgtaatcacagcactttggaaggctgaggtgggagaactgcttaagcccaggagttcaagaccagtctggacaacatagggggactccatctctcaaaaacaaccaaccaaaacaaagccaaaaaagaacataggccaacatcactaacaaacatagatgtaaaagtcctcaataaaatattaacaaaccatgtttagaaacacatcaaaagagatcattcactatgattaagtgagattcatcccagggatgccagtatggctcaacatatgcaaatcaataaatgtgatccatcacattaaagagaaccaagaacaaaaaccatataatcactccagcaagtgcagaaaaggcatttaataaaagaatgggttgagggagtggagcccatagtcagagcagcagtggtctgggattttggaagtagaaagaagggcagcaccactggccaggaccaccagggaacacccccataggccctgggtgttgtgctccagggagggttccctctggagttattaatcttggtgtccactttgcccagctgcccctcacagggtcagggaggatgaagggaaagcttccttctaatgaaagttcagggactcacagttcctagagcctgtagggagaggaagatcttcgaggaagagcacctgggcattggggcgtttgagaggaagatctatgccaggtccaagtggacaacctgtggactctctctccagggacatacgggtatctgggaatctcctgtagcttaaagaggtaaagacctctccctttagcctgaggactggaggatgctggttcaggtgaatgagtcctgcaggggctggtacaggcctggagggtggtggtgtccagggccttgggttcacccttagcatgattcaggccgggcggtgtttcacatgagcaagagggcctgggttcattgcttcaggacaatggtgaaatctcatggtggaagaaatcttgtccttgccagtgcccagctttcatttggtcttggcccagagtgtcctccctagagaagactcttgtcccttcttcacactgcccttcagggatatgccagccttatgggataagatggggtggagactgtagatgtgggtgggaatctctccacagagtgctccttctctcagcggttgcaccttgtctcagggcttcagcttgaaatctgggatctccaagcccttccctccccagtcctggccaggaccacatgggcagatgcattgtgtgaagtgcatttcatttggggtgtcctctctgcatggcaccctcccgttgattctctttgcgcatgtcagagtgcaggcaccatccacacctcctgctggaggagggacggagctgttgactcctgagagctgatcatgtgttcccaccctcacacacaatcatggtccatcctctgagggacatgtgttgccaccactgtggagatggtgcaactgacagtaacaaacagtaaaatctggtactgaatgggaccttaagccaacaatgacaatgtcattccaaggtgtttcatttttattgattcaatgcaagtcacctgatttcattgactattcacaatagctcgataaagtaaatgcatcatcaccaccactttaaagaggaaaaaggtgcttgggcagtttgtgactactgtggtggctgctgcattgctctctggtaaagccaagtaggtggtgggtgcggcctctgggctgggatgatccaccctcctggtggtggcaggggagccaagctggagccatggcctgtgcagtggtagcagctgaactgaccgctgctgcaggatttgcaagctgttacattttgcgaagccatgaagcacataaaacctcaagtagaacaagtgtttcaaagtctaccaaaatctgccttcagagattattactacagaggtggatatgaacccaaaatgacaaaacgggaagcagcattaatactagataatgaatgaacactagtaatagtagggtaagccctactgccaataaagaaaaaaataagagatgctcattaacatgttatgctcttaaatcacgcagacaaaagagggtctccttatatagtagccacaatcaatgaagctaaagatttactgcaagatcaagctaaaaacagtaggtgtataatgaatttttaacttcatattagtttatgtatatgaatatcaagtttttataataaaatgcctccaaacaaagaatatttgatttagggtttaataacttctaagaggggactcagatgtttcctgtttcacagtcagtctgagagggtcatttttcctggagctgacctgggtggaggcctcacactgatactccccagcatcctctctcctgatggggtttatgctgagcatacagtggccctgggacagctccattctctccatgagtcacagacgctggtcatggaagatccactggataaggttccagagtcatctgtggggcaggtcaggatcacaacatccttttcttctgtgactctggtgttgctgactcagatggggtcggagccactgaccctgtggacaatcagtggaggtgctcaactgaaagtgggctgagggcacgtcttctcctccatccctgggtccttaaggtaactgtggaccccagaccaactgacacaggagctagaaagaaattatttaggaagttagtgagggtaagagcgtccttggcaaggtttcccctttaacaaaaagcagcccaagataattccttttctaacaaagagcagcctgaaaaattgagctacagatgtagatgagcaagatggaagcttgcacaggtgaattccagtaggtgtgccaatagaaaagggctgcctggaagccaggtatgttcaacatggagactccatcctcccttttctccattaccacatgtacagtaaaaaaccaggcaacatggcaccggccaggtagacaatccatctgcatgacaaaagatcagagtggggcagccagcaaatggcacagctggtctaaacaatctttcaccccctgtataaatcagacactgcctcctgaagctcatctataaaaccttctgcatttcactatggaagtggcaacccattttccccaggacccctctctctgtgcagagagctcttctctttctttcccctatgaaacttccactcttaacttcactctgggtgcctgcatcctagttttccatggccatgggacaatgaacctcgagtattaccccagatgaatgatgctgtttcacaatcactggttcagctcccttcttcttagggtttcacagctcggtggggagaataccacgcctcagtggtctggggagtgaggaacaaatgaagaattaatcagattttacttagaacgctatcacctgcctcaaccatcagatccatgttgggaatgtccaggcctcctctcttagatctatacccacttcactggacctgaaatcctgtgtttcccgatgtgttggtgtcactcctatgagaggataaaggagagaactttgctttctctccccactcacaccctgcacaagacagggcccaatatgagacacacactcgctcagtagttctctcatgaaggagggagggagtgacctcgagtgattctgccatctgtagtctgtgtaccctggccagtggctgtatcttcatatgcctcagtttcccctcagtaaaataggacacacaatgagaactaaaaataaaattctaattccccagtgaactgaaaggatggcctcttggccaagcggatcccagagttcctgatcatgacaggatgggaggttacacctcattacagcccctccctttggaagtttagaggtgacaactgactagcattaacgctaaaatcgagatcatgagactgacagaacagactctctgtggccataagataccaaattataaactcaacctaaggtcatgcaggcaagggctaagccacactttcctacatttaaagaataagctatgttctaacacagaattttctttctctctagcggctaaagtaacactagccttcgagataagcaatattgaaatgatcgcggctcatccaccaacactggctaactgacccctgttccaacagccacaactacacttcaattggacaggagactgatttcagtaactttctcctaataagagaccactgagcatggcctggttctgctggtatacagacacggtgcactgagtaccataatgcttgtttcatcttttgatgtataagacctaatttaatacatttaaatctgaattctccaccccaaagtgaacatggggtgcatgtagcatgcatgtttgttgatcacgcatgtgcgtgtacttcctttgtgagtatccatagctccacctataacctgttgaatatgtatacctggccaactcattcagcataaatctatcttccacattcccctcccttgaagtgcctgctattggtctctgctggaggctgcatcttctaccctggggaatggccagcctgcaggctgtaaccctgtgtaagaaataacctggttgggtgcagtggctcacacctgtaatcccagtggtttgggaggttgaagtggtagaatagtttgagctcaggagccagagactagcctgggcagcatagcaagatcctgtctcttaaaaaaattttagggaggagagtgaggatcagaaaaaatacctattggctattatgcttagtacttggatcatgaaataatctgtataccaaacccctgattacatatataacaaacctgcatgcgtatctttgaacctaagataaaagtttgttttaaaaactatctgggtgcagtggtgcatgcctatagttccagctactcgagactgaggtgtgaggagtgcttgagctcgggggattgaggctgcagtgaattatggtcccacctgtgagtagccacttcactcaaacctgggagacagagcaagaaccggtctctaaaaaaaaataaaaatagaaaaataaaatgaaaaatatatgaaataaagtctcctttccaaacgtacagatctccgatttttctgccaacaatgataaatggtcagtggcttgccatgttgtctgtgaattacttttaaaatattcacgatcacctgacctaaaggttggtaccaaggaaccgcctgaatacaccgtctctgattatttgcctccaacagagtgttccctgggcctgatctctggtggacaatgagctgctgggaacatcctctcttctctattcctcccctggggatgctgaccttcccttggagtctcctaagttccccagggcagtcggctaatgtcctagggagcttacctgtcttctccataccaagtctcatgtgaaggacgaggctttgcccttgcccagatgaggctctgggggctgagccctggctggctaccagctgcaagagccatggcccttggacagctggtaaatccttgttcccagtcagccctgcccaagatgcctcaacccagccccggcacaggcttcccagggtcacatggagtcaggatcctgggacaggggactggacaggggtttccagggctgagtttctgaacaggggcttcccaggggtcccctcactccaggatctgacatggtcctacaaggaacgtccatggggaggggacccaggagggggaactgacactgacctccccttactgagcctccccccaaccccatcagactgtccttcctctgtagcaagtgcctgcagggtctggatgcaggaaagaaattctgatctgtggaagtttgtctcccctgtgtgtgtcttgcactaaatgtccaaacccccaaatgggatgtaatgtagagggggacacaggcacagcccaggcctgaaaatcctgtgtgtgtgaagcagaactgacccccaacacccagagctcatgagacatcactgtgtacgtgaaactggccagttacttcttcattcacaagatctgtttttatgacttgtagggtgtaggatcctgtgtcattgttggtgacattctgtatcagcagacatgtattggggtatattgtctctcagcctctgtggcaggtcctggggtaattacttgagttcctagtacatatcctgtaattcccctttgtaccagttgtagccaagcctaaggcagattgtgggtgagtggaagaatctccttgccttctgcagcttcaacagtgacttgggcagtggtaggcaagttccagaaagttaaaagtgaggctaggagtggggagagagcatcagttaatactgggccctatgcattgaggtggaaagatggggccctaggtcctggacaggtctcttcatccctcagccttggagtgtgtgtgtgtgtgtgtgtgtgtgtgtgtgtgtgtgtgtgcgcgcgcgcgcgtgcgtgcgtgtcctactgggccaaggtcagcagcatgacctcccttccttcagtgcctctgaccttggcatttccctgtttggagtccttttccccaggggtctgcctggctccctccctactgccttcaggtcctgctcacattagggcatccttgggagaccccttccctgacacctctagagaccctgggtcttccctttctgacctttcgctgctgtgttccctccagggctcttgtcaatacttgacctcacattctagatacccttgcatgtctgtcttcctccctatgagagcatgagctctgtgagaacagggacttgtgtgatcttggttgcaccccagtgcctgggacaggctgcggactcctgtggatgagctcatgagtgttcccagggcccttcacaacgtgggatttattttccaatggctgaggttgttggctaagagctctgttggagttcaatcaggctggtgggaaaaatattagagatagttatagagatagacacaaatcttcttggaagaccaaaaagtttgcataactttggtaatagatctgactgaaggtggtccctttacctttagttaaacaaattaaagtagtaacaaaggaaggcagagtagtttgtctagccagcttgtttactcatgtgatcttaagactaaccattgatgtgccacaggtgcttaattgctttctacttgggaagtccacaatgtcaattaccctctaacggtgttgactcaagcctttgttaattaatcttactgaataaatatgagtctcactagctgatcaaggccatggtcacaactgtttataggactcagcagggagtctgtaagcggccctgacagactcagctggactggcaaagcaaaatatgtgtgtgtcagtgtacactattcacccgtcccccacagctggtgcccctatatgaggagtgctgccacagagctctgtttagtgtcccttgttttttttcttgagtattaccccaacttaaattgtgattattgtcatctgttttcaacattaactgctcagtgatgattcacttggaaaacattaacaatcgagattgtttcttcactaacaacctcagattatttagattttcctgttgtaatcccttcttcctgtttagtgtccaacagaagccctctgtccctctcaggtccccgttctctccaagaaaccccagccagtctctgtgctccctcctcccatccactcccagggagccctcccctcacctgtgagcagaagcgcctgccagggatgtgcactctgtgaggaggggctgagggaggccccatgggctctgctgtctgctttgtcctcctctgtggagaggagcttgggcttcagaaaataaggaggccagaaagtaaggaacaggctgagaaataatggggatgtgtcgaaaggtcacagatgccaacatctttgtcctatgcaatattatccataaaattacaggtttgagatatgcttaaattttcttctaacatgcattaaaataaacatataacttttaatagttatattaaattgtatttaatataaattaaatgctcttgtcagagctactgtgactgtcagctctgctgtccttcctctctctgtgctaagcctcctcccagggcagaagcacttcccagggccaggggtgggggcggggaaaggtaagtggcaatgaggatctgcacaggtagcctttccgcctcctcccctctcagtcctgcctccttgtcttcttttcctctttttctccaatctacatttcagttccttagaccacgctgtgagaagcaaggcttattgggacccccatcccttaacaggatgacctgtgctccccataagtgacctctgctgtgtctagggattggctctgtcagcacctcacagagagtccctggggcccccaaactcagtgttattttctctatgacacagaaacccctctgggtatgcaaggttttcctcatgttttctaatgtctgggaaggttggatttactcccagcagggaggtcacagagatgtccagggagtggggtcctagaaatggacaaatctagagctaaagcccaggtctacgattttcagttgtttttttctgcagtgctatgtgaccctaatttcctaggagtaactaaaatgcaaacctcagacatttgtagacattttatgatttttctctacagcttgtaccactgttattattatttgctttatgctttttcctaaataaatttactttacaaaacatccttgtcctagtagggtgcaggggctcacgtctgtgatctcagctgcttgagaggttgaggtgggtggattgcttgaggacgggaatttgagacaaaacatctttgtcctatgcaatattatccataaaattacaggtttgagatatgcttaaattttcttctaacatgtattaaaataaacatataacttttaatcatcatattaaattgtatttaatataaatttatatacaatacatttttatataataaattatatatataaatgtatatataatagtttttcttttttgagatggagtctggctctgtctcccaggctggagtgcagtggcacgatctcagctcactgcagcctccgccttctgggttcaaacgattctcctacctcagcctcccgagtagctgggattacaggcgcctgccgccacgcccagctaatttttgtacttttttagtagagatggggtttcgccatgttggccaggctggtctcaaacacctgacttcaggtgatatgccgcctcggcctcccaaagtgctgggattacaggcatgagccaccatgcctggcctatatattttatataattatataaagttttctataataaattttatataataatatataaaatggatatttatttaagataaagttattagttttatatatttacatatatttaggaataaatgtgttactgtgggagcccagtgcccaggcaggtagtcagtacatgatggttgtcattagggttaatactttggaattctggattttttcccaagagagtgtctacgctggaatattgggcttgtggctttctgctgatgtgcatgtgtgaagaagctacttccacttattaggacttgtgtatctgtctcgcagtttcactacctattttctcgtgatgttggtcaagtcgcctaacttttctgtgcctcatttacctaatttgtagaatatgggtaacagtacacaagtgtgagtgtgtatttcccaggactgaccactagagggcgtgaaggcaccggcacttactattacagcaatgggtgtagtagtgctcatggtcgtaaacatcattctcccatgaaaggaaccagggcttcctgggagaaataactgattccagggctggggccggaaagcacaagcggagcctggagcatctcgtgaggccagaaagtaaggagccggctgaaaaataatggagatctgtcgaaaggtcacagatgccaaccagaaggagctttgaatgaccaattttgagacaaaatgagcactataagaaataatgatagtaataaattccaacccataaatacccatgagttcctactaatataaataaataattgaatacataaatatataaggatgaagaaacagctttttcttacagcagaattccaattaatgaatgtagaaggaatgatcaaatagaaaatcactatttggctaacagcacagtcaattgtttgtaggcaagaattatcaatggactttaaatatgaatgggtaaaagtatgatgatgctacaactagtgagtaccaagggggaaaaaaaagtacgttgagaagaaacaggctacttccatattcccaaagtatcacttcaggagctacttattgattataatgggacaaatagtaacttacagtagagaaacctggcaacagagtctctccgaggtacaaaggctctcttcaggaaggaggtaaggggaaggaagaagaaaacactgtcctgcctcaattatttgctttccccattctcaagtgtacttcatagacattcaaagatatgtgttgatagtgtccacgatccacatggctctattatagtcatttattcacacatacattcagtgaggctttgagtgcctaatgtgtgcctgatatttgctagatggtggatgctgagaagatcaggtgtgctgctgtctctagggtgactgaatccacctgccccactttacagatgtggaaattaaagtgaaaaggatttataggattagttcactgtcacaaggtcactagccttaaagttacaggagtaaagcaagtttcctgacttgctagattttctgctgcaggtgctgacaatggtgagctccaataggagagaggacactcagagtgaagtgggagccctgaacaccctggattagccaagaggacatgccgggtccagctgtgaccgcacaaaggaccattggggatatttgtattctctttttcacttagagcttgaaatgaggaaaactaagtgcagaaaaccaagagtggaagatttttcacaaagcactggtaacatgcatcagaaaaccctgtgctgatgtctgtcacggtgtttctcactgaacggtaatagtctggctttgagtgtgttccctctacagcctggagttctgcgaggcagggaccaggtgtgattcatctttgtctctccagtgacagtacacagcaggctctgataaatatttcttacaaaataaaatggaataaaaagtagacatctgcacaggtgtgggatgactgagcagcagcagaagcaggaaaagtcagcgtccccagatcagctgatgtggtgttcggattctagataggggtgaggtgccaggatggggatgggggtcctgtggctctgctgccctgggggacacccctaggtttcacagtgcctgctgtggttgctgcactttgcttccccatgggaaagtgatcagagggtgtggggcttcaggtgaccccatgtgggaaatggccaagggaaggtggggtgggcggcacatggttttttttaaccaatatttgaaggtaggttgtatgaaaaggtgttaggcttatttcagcttatggggagtaggacagggattggtgagtgtgtatcaggtatattttggctcaggatggaaaagaactgtcacagtaacataaggtcttttgggaaattacatgtttactggcagagttcaggccagggctgggtgtctgaaaatacctgtcagggtcacttttatggttacaagggcagagcttggcttggaaccaggtttcttactaataccacatattaagtattataaaaactgtcctttgcaataggacattgctctatgatgcaggttgaggtccctctgtttaagtaattgtgggtggctgtgattctctcatctagtctgcgacttggacttcacctccatctgcagtccctctcctttgctgttgacactggtcagagttaagcgcatttactgacgatggtcacagggtggcagcactgcctctctggtattttctaaaacctcttcctggaactgagccagtctaagaggatgtcatgactaagaaaagggcactaatgaggtgaacagataattttttttttcttgtttctcctgtgaagtaacagagtggaggtgagcatggaataattgccttttagaaatggaagacaatggagagaagtgtttcgcaaaccttaatgtgttcacagatcccacacagatctttttattcaatacagattctgatttttctggtgaggcctgagattgtgcatgtctaaggagcttttggatgatgccattgctgctggttggcggaccacactttgagtagcaaggctcgaagatcatttagaggttaattctcactgcatctaatttatggatgaaaacaaaccaaggtccagagagagcatatacagcttgcctaacaaagccattccctaagtgcctgacttcttgcatttaaacccagggcttcagcctttgtccagttctcactccacacatcacacggtttgttcactgttgtgaacgacagttgtggcagcatctctttagtttaggaatccagagccccaatttcactaccctctttggtcttggctcatgctgtgacttcgaatagttttgcccttacttaaaatcttcagtggctcttttgtaatcacaagatcaagttcgaatatctctgtctagtgttcatggctttataacatatggtatctctttagtaaccttacctaacttccctgttttaaaattgtctcttgctgccatagccctccttgctccttcctgctccctaacaaactgtgttcacttctctctcagtggtagtgatgatggcatggcctctgatgttagactcatgtaacttctaatcccagatccaccaccaacattggcaagttgattcatctttctgaggataagcatcctcctctgaaataaacttagatggcggttgagaggggtaaataaaataacacacaaacccactctcatccctgagaccctcttcaaaactagcatataaaaatagctatttgaagaggttcagtgaaattcaaggtaacacagagaaggaattcagaatcctatcagataaatttaatagactgaaataatttttaaaaatcaggcagaaattctgtagctgaaaaattcaattgacaaaccgaagaatgcactaaatctttcaacagcagaattgatcaagcagaagaaagaatttgtgagcttgaagagataatatatgaaaactcagagtcagagagacaaaagaaaaaagaattaaaagaataatgcatgcctacaaggtttgattattaagctactcaaagagatacaagagaagggtgaaaaccaacataaagaaatgtaaaaaacaatcagaatataaatgaaaaattttctaaaatgctagctagtttttttttgagacaggctcttactctcatcacccatgctggagtgaagtggcacagtcatggctcactgcaggctcaacttcctgggctcagatgattctcccacattagccttccaagtagctaggactaaaggcgtgtgccaccaggccaggctaattttttgtatttttagtagagatggggttttgccatcttacccagggctggtcttgaactcctgggctcaagtgatccaggagattcactgccaaaaaggatataaccaagtcatatagtcataggttatctaaagtcaatgtgaaggcaagaattctaagagcagtgagacaaaagcatcaattaacttataaaggaaaacctatcagtctaacaccagatttctcatcagaaaccttacaaaccagaaggtattggggtcctaatcttttggcttcttaaacagaatagctctcagccaagaatcttgtgtagagtgaaattatatttcaaaatgaaagagagaaatacagtctttttcaggcaagcaaatgcttcaggatttgtcacggctagaccatcctacatggaatgttaaagggacttctaaatcacaaaacaaaagatttaaatagaacagaatagaacctcttgaaaccaaaaaattcaaatggcctataaaacaataacacaataagaaaacaaagtagataacgatcaacatgatgactggaacaaatattaacattgaatgtaaatgacctaacactccacttaaaagacacagattggcaagataaataaaaaatcacaaaccaaatatcagctgtcttcaagagactcacttaacatgtaaggattcttatagactcaaggtaaagagatgataaaagatattccatgcaaatggaaaccataagtgagaaggaatagctatccttatatcatataaaacagactttaagcaacaacagtaagaaaaagacaaataaggcaactatataatgataaaaggatcaatcaaacaagaagatattacaatcctaaatatatatgcacctaactttggagctcccacattcataaaacggttatgatgagacctaagaaaaaagatcaacacaaaacagtgagggtgtcctgggttttctttttattggacagcagtgtactagcctatcactttcccagtcaggggatttttggtctccccattcccctaccatgggttcatgccaaagtccatattttttattagtgtttggaattggattttttttttttgaggtggagtctcgctctgttgcctaggctggagtgtagtggcacgatctcggctcactaacctctgcctcctgggttcaagcaattcttctgcctcagcctcctgagtacctgggactacaggtgcatgccaccacacccagctaatttttgtatttttagtagaaacgagatttcaccatattgtccaggcttgtatagaactcctgacctcatgtgacagggaaacaggcactcagtgaacttcatgcgattgaggagttaatgataatgagagaagggctgtgaggggacagcactggggacaccagagcctgtgacgggctgagttgctgtgccttgggagatgcccttttgactgagccctgggaaggagggggtgtgggggcaggagctgcctgcagagggagtggcctcaggtgggcggccacctggctgcagggaagaggtgacagagttcgtgtgcagagcttggagggtgaggaggaggtgggttgaggtgaccttggtgagggtgaaccatggggggctgtgggccctgctgagggaggccagccagccctggacctacagggtggtttggtcttttttgtcccattcccagcatccactgagtggtgaaactctgcaggccagggaccatcccactggccagaaggagcgcacagtaggtgcccactcagtgcatgttgggctggacagaacctcactctgccccctgcccccagctttgggagctgcagcaaggtccctccccctagggatctccatgcctctgtctctgaggggtgagatggggagacttcaaagggccatctcagagtgtgggggatagagacgcagaagtgtgggggatagagggaggcctgggctctagacccaaaggaccttacacacctcctgagtcttttcaaatggtttcttctgttactttaaaaatgatgtaagtcatcatatttattgtaaatcccaggaatctaatcatgcgtaaaataaggtgtcttatccttgaccccaccccttccccaattaaatttccaggatgttaccactgtttgcagttggtgtgaatctctctttaataatactctgtttatctcacttgtcgttttacgccaaaatacccattgaattatattattgctgaagaccattcttttttttttttttttttttgagatggattcttgctctgttgcccaggctggagtgcaatggtgtgatctcggctcactgcaacctctgcctcctgggttcaagtgattctcctgcctcagcctcctgagtttctgggattacaggtgcacaccaccacacctggctaatttttgtatttttagtaaagacagggtttcaccatgttggtcaggctggtctcgaactcctgacctcatgatccaccctccttggcctcccaaaatgctgggattacaggcatgagccaccacacctgcccagaccattctgttctactgaatcatgtgtggtgggcacctcttatatcaatacatatggattttatcttgtgtttgttattggctcccctttttctcattgcatggctacactcaatgctttgtccacacccctgttcctgggttggaatcttgtgacagaaaatgaagtaacaaaggctaaagctttctaaagtggagtcaggagattgcaagacaattgcactttcaccagcaagagctcaaaccacagaatgttccaatagatttggataaacagctgaagtcagtattcaccagccttcaacatctcaactaggagaaccctaaaattaactaagcacatagaatggaatggacttgtgatttaggattccttctcagccaatgagctgcttctgaaaacaactttttgtggaaattacctgtaaagaaaaccctctcctgtgcttgtcttacagaacactagtcagggctgccctgattcagtggacccgaattgctattatttgtttcctaaacatatggtattttctgtgaccttcatctcaatcttttttttaagttactgggctgtttcccagttttcataatgacgagacattctgcagtgtttcatacacatgtcttttccccatgtggagtattgatccaggagctcattcagtcaacgcatgtttatgaagcatcctgtgccaggctgtgggctggtcactgtcttcagcagagagaggacaggcacagtcttgccttcacagagctcacagctcagggaggctcttagaagtgggatactggtcggagcatgtgcacattaaacatgatgaggtcaaggttgctatagggactaaaccacagtcccaccaagatcgcattgagttcctgtggtagaccagaggtcagggcccctaagatgtcctgagcagctccctctgctcagaagttttggttccacaggtgacacacctgagcacaggtgacccctgcagaacctgtgattaccacccaaagccaagagtgagtggtgggtgttctaggaggaaccgtcacctccatgggcagggttggggaagactgaggggagcaggtggctgatgactttggccagaaggtagggggatgggcaggtgtgcgctcatagggaagggaagagaagggagggcattgcaggcaacaacacaaaggttggaacctgccttcatggactgagaaaagcagggagtccacccaggctgcagctggggagggaagacatggggagcagtgggtctaggggagaagcagactgcgattgaccttggggactgggcagtgagcagaggtgtgttatgtgtgtctgtccccatcatagatatgaggaggggtgaggccgcgggtggcacctgggtcggtgggatttcatagtgcctgctgttccctagagcctctctgtatagagggtcagaatagatctgaggctgtggtctgggggaaggggctggtggtgcttaccatctctaggggtgggaggagagggatgaggatgcccctgagcagtgaagcctcaaggtgtgtggagccacagttgtctctcattagacatgtgttttgcgtgaggatgccagggcctggtggttattactgttgtcaagtttgcatgacaaggacccaggtatccagggatccagagcacagggcccctggtgaggggatgaggctcagatggggctgaccaggttcatgtggtcagagtgggagggactgatggagagacagagcctcaacccctcctgtcaggagctgtggctatgtccaggagagatgacaaggatgacccaggacattgagtgagtcattgagacattgaaggtgaggacagggcagagaggaccctggtgactgctgaaatgtaggatgtgaggagggctctgacccatgcaagttacaggacctccccacccccgagcccacagatgacccttaaattgggcatcctgagtgctgtgtgtgcccagcagggacactggataggctggacctgagtctctgtaagggcagcgctggtctgtaggaccagagtcttctctgtgggtgtgacgtgggcaggaattagcaagatgggggtgacaaggcttggcttggaggatctggtacagaagcccatgggcttggtcagctcagcttctcaggggctcagctggggctggaggagcaggatgctgtgctcagggcatgctccaggcagcgtgatgtgtgtggttccagggtcaggcacgggggtcaaaaattaaccatgaaaagttcccaccttctgtaggcagagaaaatggcctgattgtcagggtcagggagacttaccatgtggccaaagcaggctctcagcctcccagagaccacaccctgggtgcagcactcagctctgcagggtatggcaatagatgtgccaagaaccccaacatccagatgcatgcaaaaattttgcgatatataaaatagagcagatcaagtttccctgcaataacgttgttcctggttgtgtctttttcttgtaaactagacatggacatctttccagcagtctgttctcatctgccaccttcctgctgcagcacctcagaatgaacattcctgagacactgtccgtggtgctgacgaccaagagctatggaacagagtgtgatgtagaatcttctagttacctctgctctcctttcacttttaacaacagagcatcattaacaatgagaaggtggagaggtgttcaggatcttgaagtgacttctgtcttgctctcccataaccctgaagctgctgtagacattattgcagaaactgacaccacagtcaggatggccttgtccaggagcccatgtgcagtttgtagtgagcaaggatgagaaaatggtcttgaaaggggtgatggacagaacaggggcttttcaaaaatgtcacatcatcacccccagcatccgtgaatctgtcacatggtaagagaccttacagattaaatgaaggattatgagtttggaagattattgtagtttatccagatgggtccaacataatcacagaatcccttccttacaaatgagagagggaggtgggagagtcagagaaggaggaggagatgtggggatagatgcagaagacagagcggtgtcaagatgctgcactgctggctttgaagatggagaaagaggacacagccaaggatgcaggaggcctctaggaggtggaaaaggagaggaaacgcactctgccctggagcctccagaaagaacgcagccatgtgggcaccttggttcaagtttctgtgtcacttagcttgtgggaatttgtcacagcctcaacaggaacctacagaggagtcaccttgtgtgcaggtgggatccagggtcatttacagctaaatcctgatgtaaatattgcaggttgcttttcctacttcctatctcatggccaacaaccctggacaatggcagaacacccttggaaaccacggctctgtgctttagtggagggaccagcttgtttgtgggaaggtagcacctggtccaagtgaacctacatgagatcgttactctccccagggccctcagggaagggctgagaacagctggcccaggtgtgtggaggagctgcaggtgaggcagggctggaggggcctgtgggtccaggtagaggggcagacaggttgtcccatcgccatgggagcctgcacgagctttaggttggggaaccctgctcctctgacctggacgctcctgtgtggagaggaggcttgctcagtgagatccacgccagggggtaaattgggaactgatgggaaatgaggggctagagtcctgggtagtgcctgggaggaccttgctcaaggactgaattcttggtctgttcccaccttggttactctgacaacccctctctgtgtcccacggggataaagatctcctgagcagtggccattgggacagaggagaacctggtggccagagctaagcatccaggatcctggatttggggacaggcaagctcattgctgggggacagtgatagatacggcctccagggcctgggtgaagagagcaggagggctcaggacactggaggctgtgtggaggtcacacccacgatctgtaccacccatggatgctcctgcattgctcacctttgtgtggacatcagatggccccaacttttgcactcctgagacatctcatgcattcacagagggacccaggctggggctgtgcatggccttggtctctagggtagtgtgaggacagctgagcactcagctggctgggcaggactcctgcgaatcctgccctttcctgtgtagggtccaccccagcctgactcctaaccccctactcctgtctttccagggaagagagactggggttgagataaggtggagatatttttcctgtgtgacccaggagagaatggacatggagtttcaggtgagtttctgctaagttcccatgagcagaaaaagagccaatgagaggaagtttcccctttattcagatcctttccaggtgaccccgggtgggccataggcccattcactttccctgcaagcccccgcttcctgtggtgatgggaagccttcgccttggcccacccagagcccggggcagtctgttgaggtctctatatattcagcagggacccccatcccttcctgtccccaggcctgtgtctcctcaggactcagagctggttctctggctcaggctccatgtccttccccatccccagggctgggggcttcagggacgctccatcaacccacaggagcagctcccagaggaacctaagaagccacatctgctttgtggtcgatccagcagtaaatgtttgtgtcagagtgtagcaattccagtaaaaacagagaagaggtcttgacccctgaggccttctcagaacagggtctggcatctctctctgggcccacccagggctactctgggactgaacctggctgtgctcagggggttcctgctcccaggcccctccctcctctgctcaccacctcctgttattttcactgcagtttcctgaacttcagctcagccagatgccagtggggacagatcctgggtctccctggggcccaagggaccagaatatctgtggcccccactcacctcatagatgagagcagctgccctggtgctgggtaggggaatctgggcaggggagagaggggtgtcaggggacagggaaggattcctgctgtgtaggaattccagggctctcctcaggtgatggagggtcccagggtggggttagcacagggagtggatgatcctggccctgaacagaggcccagctcatggccagggcaggtctaaccttatccaagtcattctgggtagggtgggtttgtgctggggattgacagtccccctgccctgagcctgcacagctggggccccagtggaaatgggattgggaacggacagtcttacctaggagatggagctgtcagagggtccatggcctggggacagagacaaaagtgagcacgagagtgttaggatagctgggcccctcctgcaagagtgtgtgggggtcctcagttcttagagaattggggagagggagcctttctcaggttattttaggggtcaagtaagcaagtgaggttgaggaagtgacccatgacccagagcccggaggttagggctgacccggccagttggggtttcctgtgtgatgttttatgggatcctctttgcagccccagggatagggtcagaggcccctgggtgtaactggcaggagtggacaacttggggctggcttagtagttcccagccacacccagactgaagggacactcaccgggggtggaggctgggggctgctgctccctgaagtcactctgatcgctggccctaggaaaggtcagggttatttgtgaaggtgcaaggttaaaagtcacaaattggagttaaaataggggaccaggaaaggagcctatttccaagaggggtatggagacctcctttctttatggagttctgtggtaggaggggcccaggtgaggggagttgaggaaaggccttacaaagccacatctgtcctggccagaggggaaggactctcaggcagatgctgggccaggagaacattgatccagtgacacaggaaagggactgaggacccagggaaggaatcagaccaccaggggttgcctgagaggaagggtcaaggcaccagggggaaagcagggccaggcacatgtgcaggacactgaggggactgcatgcatcttggattctcctggaactcagtgtccctgctgtgaccagacactccactcagggctggagatgctgaaatgggacaatgatcttgtcttctgtctctgccctttggcaagagacataaacgacattccaggatatgccatattggggccccggttctcccttctcacagctcagtgtctgcagttaccatgtcagtcaaaggggtgctgaccccacccagcccgtccaggctgttccagtctccactatgtgataatgcccaggatcccccctcagatgccctctcactgggtggatggattcagtgaacagggggaggtaccaggtattgagcaccgctcccccctgctccaggcagctgtggctttgctgtgctaggaaactaggaccatgctcaggggcatggccttaattggactgaattcactgaggacaaagctgttgaggaagcagcccagggtcagcagctggtgaggaaggtgccatggaatgagagggaaggatccctggggagtcgggaggctggggagagcctggcactgaatacaagacagggtctccttccttctcgcctggggtcagcgtgaaggatgggagcagaatggggaaaagctgtggtacctgccagtttttcggaggagcaggaaacacacaagtgcagccaccagaagactcccaaccaggaccccgatcaggatgcctagagtgttgtcatctgctgaaagaagaaggcaaaggggatgaggtccaaatctgttccagggggaaccatgaggggccttgcagggcaggggcatggtcagggaggaaggaaatgccatggagcctgagtgtggtctgttgtgctgtcctcatagctggctcccttgctctccgtggttgcaccattttctgtgtcttaggcttgaattactgggatgcatcaactcctacattctcccacaggaagcctgcacctcatcctgctcctgtgttttttagtccctccttcctctcacatcactcctcttccccctgtttctttttttccatcccatggcagtcgtaaagggcaggcccttgctgccaactcaatgctgatgagcagggatgatgttcattgactgttttcaggggccttccacatggaaggcacagtgggaatcaatctacctgcagcttttctcaccctcccattgccttgagggagaagggtatgtgatattgtgaaatacgtatttggtgttcatcaccattgatatggttaggctctgtatccccacccaaatctcaccttgaattgtaataatccccatgtgttatgggagggaccttgtgggaggtaattgaatcatgagggtgggttttttccatcctgttcttgtgatagtgaataagtctcaggagatcagatggtttcataaagggaagcttccctacacatgtcctcttgcctgctgccatgtaagacatgcctttcaccttccatcatgattgtgagacctctccagccatgtggaattgtgaatcaattaaacctctttcttcatacattaccaagtctcaggtatgtcttcattagcagtgtgagaatggactaatacagtaaattggtaccagctagtggagtgctgctataaagatacctgaaaatgtggaagtgactttggaactgggtaacaggcagaggttggaacagtttggagggctcagaagaagacacaggaaaaaagtttgaaacttcctagagacttgttgaatggttttgattaaaacgctgatagtgatatggacaataaagtccaagctgaggtggtctcagacagagatgaggaacttcttgggaactggaacaaaggtgactcttgttatactctagaaaagagattggtggtattttgcccctgccctagagatctgcagaactttgaacttgagggaaatgatttagggcaactggtggaaaaaaaattctaagcagcaaagtgttcaagatgtgacttgggtactgttaaaaacactcagttttatgtatttacaaaggtatggtttggaattggaacttatgtttaaaagggaagcagagcataaaagtttggaaaatttgcagcctgatgatgcaatagaaaagaaaaatccattttctgaggagaaattcaagccagctgcagaaatgtgcataaacaatgaagagcaaaatgttaatccccaagacaatggcaaaaatgtctccagggcatgtcagagaccttcctggaagccccttccatcacaggactggaggcctaggaggaaaaaatgtttcctgggccaggcccagggctcccctgctgtgtgcggcctagagacttggtgccctgcatcccagccactccagccatggctaaagagggccaaggtacagctggggccatggcttcagagggtgcaagccccaaaccttggcagcttccatgtggtgttgagcctgcaggtgcacagaagtcaaggattgaggtttgggaaccttcgcctagatttcagaggatgtatgaaaatgcttggatgtccaggtgaaagtttgctgcagaagcagagccctcatggagaacctctgctagggaagtgttgaagggaaatgtggggttggaaccccgacacagagtccctactggggcactgcctaatggagctgtgagaagaagaccacaatcctccagaccccagaatggtagatccactaacagcttgcaccatgcacctagaaaagctgcagacactcaacgccagcctatgaaagcagccaggagtggggctgtaccctgcaaagccacaggggtggagcccaaggctatgggagttcagctcttgcatcagtgtgacctggatgtgagacatggatacaaaggagatcatttcagagcattaagatttggctgccctgctggattttgggcttgcatggggcctgtagcccctttgttttggccagtttctcccatttggaatgggtgtatttacccagtgcctgtacacccattatatctaggaagtaactaagcttgcttttgattttacaggcttataggtggaagggacttgccttgtctcagatgaaactttggacttggacttttgggttaatgctggaatgagttaagactttggggaactgttggaaggcatgattagttttgaaatgtgaggacatgagatttgggaggggtcgggtggaatgacatggtttggctcttcttcacccaaatatcaccttgaattttaataatccccacgtgttgggggaaggacccagtgggaggtaactgaatcatgggggtggattcttcccatgctgttctcatgatagtgaataagtctcacaagatctgatggttttagaaaggggagttcctctacacatgccctcttgcctgccgccatgtaagacatgccttttgccttctgccatgatttcaaggcctccccagctatgtggaactgtaagtcaattaaacctcatttttaaaaaaattacccagtctcaggtatgtctttatcagcagccaagaccagctcggtcgcggagatcctaacccagcagtgctagaggaattaaagacacacatagaaatatagaggtgtgaagtgggaaatcagggttctcacaggcttcagagctgagagccccaaacagagatttacccacatatttaataacagcaaaccagtcattagcattgtttctatagatattaaattaactaaaagtatcccttatgggaaaccaagggatgggccgaattaaaggaataggttgggctagttaactgcaacaggaacacgcccttaagatgcagattgctcatgctattgtttgtggcttaagaacgcctttaagcggttttccaccctgggtgggacaggtattccttgccctcattcctgtaaacccataaccttccagcttgggcattagggccattatgaacatgttacagtgctgcagagattttgtttatgaccagttttggggccagtttatggccagattttggggggcttgctcccaacagactaatacacccattttctggtatgtgactctaaagtccttagaatcttcaaagtgatgtctttttcaagctaataattgactgatgactggcagcccctaggcaacttcagaatgaggctggtcactgacccaggtaggattagagggttgggactttcagcctcacccctaatccctggggagggacctggagtttgaattaatcaccaatgaccaatgaatcaattaatggccaatgattgaatcaattaatggccaatgattaaatcaatcatatctatgtcatgaaccccaaaaggactgggtttgaagagctgaacccatggaagtttctggagtgtggtgcatctggggagggcatggaagctccacaccccttcccacatgccatgctctgtgcatctcttcatctgcatcctttgtaaagtcctttattacaaaccggtaagcctaagtatgtgtttccctgagtcctgagagctgtttgagcaaactaatccaacccaaacagggagtcatggaaacctcaatgtgaagccagtcataagaagctctggaggcccagacttgtgactggtgggaaggtggtggcaattttgtgggactgagccctctgctgatatgtccaggtagatagtgtcaggatggaattggaggacacctagctgatgtacggtgcagaactgattggctgctgggtgtgtgggagaaacccccccgcatcacatttggtcacagaagtgtgtctgtgttgatgattgttattgtggagtgagagcagaggaaaaacacagtttgagtttttccaaacagggtggaatcccatctgccaatttagaatctgaaacttatagtttcagtacttcaattaagattgaagtacttcaattcagtacttcaattaagattcagtacttcaattaagattcagtacttcaattaagattacagaactggtaagtgaaagtgatacaacaaaaatgtaaccaaagtctgctcaacttaacagctaataacaacaaagttcataaaaataataccagtcgatattgatagcactgattgagccctggctctgtgcatgaccttgttaagggctttaatcgcattaatctctgaataaatatcctcacaaccaccctgagatccaggtgtttgtaacaattctacagatgaggaaactgaggcccaggaggttgagtgtcttgcccaaggtcaaatacctggtacctattgtaaccaggatgataactggatgagtctaatccctgagttcttacccacattgctccccaggctctgaaggaatctcatccttctcattccgtgtatcattttacaccccccctccctcctaggaaaatatacaaggaaaggagtgagaggggccgagggtcactcacattttacagtcagcttgagggggtcgctcctgttggagctgactgggttggagacctcacactgatactccccagcgtcctcctgcctgatggggtctatggtgagcatatggttaaaccaggacagcttcatcctcttcgtgacctgcagacgctggttgttgaaaatccactggaaagaggttccagtgttatttgtgtggcaggtcaggaccacggagcccttctctgtgactgtggtgctgctggcttggatggagggctgagccactgactctgtggatagagtgaccaacagaaagtgtcttggggccatgctgcatcctcagagatctcagagtcaaatttagaacattctcctgtgaataaaggagaaagatgaaggacagggaggagcagagagaaccagagacacccatagcagcgagcagtagggactacagtgacctcagagaccccagggaccaggaggacccagctgcctcagaccaggaccagggagccctgaaaaccctcccacagatgagcggccccagagtcacatgagatgcaatacctggggtggctttaggagcaggcagtcagagaaatggaacatgggtctcagcccctaagggacaaggaagaggtgtggccagctcctcctaggatcctacatccaggacccagtctgtaaagaggttatgattattcctttcttttttcattaattccctccctccttcatcagagaactactgagtgtgtgtctcagttgggccttgtgcaggtacagggtgtagtgggaagagaaagctgagtcctttccttcatcctcccatgggagtgacatcaacaaatcaagaaattcatgatttcacgtccagtgagggaagaaatgtggatctgatgggagaggcttggacaatcctggcattgagtctgatagttgagacaggtgatttcgttctaagtaaaaactgactaattctccatttgcccgtcattcctcagaccagaatctccctctctgagctgaggatgcccaagaagaaaggagctgaaccaacatctggtcctggggtccacagatgccccacggtggtggccacgaccagattctgggctgcagacacacggtggtgtgacgttgagcactgacagcctgtgtgatgctgatgcaatttctctttaataaaatggggtaaatgtcaatggtccctggcttgccatcctctctgtaaattaacattaaaatatttacaattacctgacctaaagcttggcacagaatagctccaaataaacatcatctattattattttactccaaaaaaaaaaaaaaaagagttctctgggcctgattcctggtggagaaggagcggtccagagtgtcttttctctgctttccctcctcctgaggacagtgcacttcccgggacatcttttaagtttcccatccagtttaatggcctgggaagtttgtttgtctgtcctctccactctgactctcaggtgaaagatgaggctctgcccttgcccagatggggctctgggggctgagccctgcctggtgaccagctctaggaaccacggccctgggacagctggtaaatcgttgctcacaatcagccctgcccaggaagccacaacccagccctggcacaggctccccagggtcatctggagtcaggatcttgggacaggggcctggggcaggggcttgaagggctgagcttctctcagaggatcctcaggccaggccctgactgagtcctataagatctttctcaggtcatgtctatgaggaggaggccaagcggggttggactgagactgattttcccccgctgcatctcccgcatcagactatccttcttgctgtagggaatttccacggagtccggataagggaaaggaattctgatctgttatagtttgtctcccctgggtgtgtcctgcactaaatgcccaaaccccaacatgggacgtaatgcagagggggatgcaggcacagcccaggcctgacaatcctgcgtatgtgaagcagaactgacccccaacacccagaggcacggaggaatcactcaccgtatacacggagatggtgagatgcctgttcaatctgagaatttctgtatgtgacttgtagggtgtagtatcccgtgtcctctagggtgacgttctggaaatgcagatctccactgggtgatattgtctctcgaccgctgtatgcaggccctggagtcctaacgtgagtgtctattacatatgctgcgattagctggttgggctccaccgttttccctttgtaccagccatagctgtaaagattctcgggcagataaaccacagagagatgaacattctccccttcagcaacttcaaagggcgctgatgcaataaagagccaggcagtggtgggtgcgttccagaaagttaaaagtgaggctaggaaagggagagaatatcagtcaatatttgacctatgcattggcatggaaagacggggtcctgggtgcaggtctcttcacccctcagccttagagggtgtgtgtgtgtgtgtgtgtcctactgggtcaaagtcagcagcatgaccctcattccttcagtacctctgaccttggcatttccttgtgtgaaccctctttcccaggggtctgcatggttccctccccactgccttcagttcctactcacacaagggaatccctgggagacttctttcgtgaagcctcctctagagaccctgggtcttccctttctgacctttcccagctctgttccctccagggctcttgtcagcacctgacctcacattctagatctctttgggtgtctgtcttcccccccatgagattgtgagctctgtgagggcatggacttgagtgatgttagttgcaccccagtgcctgggacaggctgcagactcctgtggatgagttcatgagcgttcccagggccttccatatcctggggtttatttgctaatgtctgaggttggcagatgaagacagagtttcatgccctggtggtgtttttatttaaattgtcactgtgatatagttttactatcattttcaaaatgtagtggccactgacaatgaacttgaaaacatggaccaactgagattgttttgccccttggcaattccagttcacttagattttttggttctccttagacgctctctcccctgagtctctaacaaaagccctctgtctcctctcagagccccatcctccccaggagaccccagccagtctctgtgctccctcctcccacccactcccagggagtcctcccctcacctgtgagcaagagcccctgccaggggatgcattctctgtggggacaagctgaggggggccccatggtctctgctgcctgctctgtcctcctctgtggagaggagcttgggctccaggaacgctctagacagggttactgtgactgttgtctctgctgtccttccttcctctatgctgagcttcctctcaggcaggagcacttcccgtttatgggcaagggcggggctctgcctacaatgtctctctgtcccctcccctctcagtcctgcctcccttgtccctcctttctccttcctttttgcctatatttggttccctaggcaaaactttgagaagcaacgctgatggggtcctcataacaggacgacccactctccccagtactgacctctgctgtgttctggccttggttctgtcacagccggtagattatttccctttgtgacacacaaaaccagctgggccctgggtctcctcatgctctccagtgctccaggaaggcagaatgatgcccagcaggaaagtgacagaggtggctctgggggctagaaaggggctcactgggtgatggctgggaaggacccacccgctatcttcagtgtcaccagcctggcctctgacccagggacagagacccaggcctggaggtctcgggaggatccccagctcctaggtgtggagggaggtgtcctgtgtgtcctgggaagagaggactttgatggaaggaggtgggaggctctgggttctgctgtccttggtgaaggtttcagggggaccctctccatgtctggggtctgtgcccccagcttaactctcattctctttgcaaatacatatattttgtggatctgcagttgcctgaactgtctcatgtccctaaatctttgtatccctttttacagaaggtcaggaagggtgtgtacatgagtatgaggactatctgatcagggcgagtgtttgtttcccaaagatctctttagatatggtataatacataagataaatgtactgaattagcaattttaagtgtagaattaaatgatactaattctattcacaatgttgtacaaccatcaccataattttttaccagaaaatcttcattataccaaatggaaacttcatacttttaatcaataactccccacttccccctgccccacccactggtagcctctgatactatcaatctctgtgaatttgcctagtttacatgtctcatataataaggaattatatacgtgtattatttttttctggattatttctcttagggtaacacttttaagattcatccacgtcgtagcatatattacagcttctttcctatttatggctgagtaatatcccaatatatgtttatacctcaattttaattcattcatctcttaatggacatgtgggtggtttccacatttttgctattgtgaaaaccgctgcaatgaacttacacttggaagtatctgtttgggtttctgtgttcatttctttgggggtacatataggagtataaatatggggtcatgtggtagttctatgtttaagtttttgagaaacagccaaactgttttccagtttgctgtgctattttatattcccatcagcaatatacgagggttccattttctctacattcttgtaaacacttactatttaatattttttaaaacttatagccattctagtaggtgtgaagtgatagctcattgcagttttgattttcatttccctggtggctgatgaagttgagcattttttcatgtatttactgacaattttaatattttttagagaactatttattcaaatcatttgctgtttaaaaaaaatgggttatctttttattattcagttgtaatagttctttatatattttagatacaagtcccttatggggtacatgatttgcaaaatttttctcatattctgtgtcttctcactttcttcatggtgttctttgaagcacaaacatttttaactttgatgaagttcacttatctatttttaattttgttacttatgctcttgatgtcatattgaagaaaccattgcccaatccaagatcattaagttttactcctatatgttcttctaatggtttgataagttttgctattccatttaggtttttgaaacattttgagttaacttttgtatgggctgtgaggtaggggtctaactacactatctcgcatgtggttatccagttgttccagcacaatatgaagaggctaccattctttccccattgaggaatcttggcacccatgtcaaaaaccaatgggctgtaatggtgagggtttatttctggactcttgattctattccattgatctctatgtgcattcttgtgccagaagcacactgttttaatgattgtagtgttttagtaagttttcaaattaggaagtgagtcctccaatttttttttccagattgttttggccattctggggtgacttttaaaaaagatgtagttcaatggttctcaaagcaggagtggttcagctctccttttttggcagtctggagacctttttaggaccttaatctaagtagataaattattcccactttcttttctgagttgctatgttacagtgtatattgacacccatgaaataattgagagaccctggaagtgcttgcctacatagtgagggacaattagttccatgatcatgggcacagaagattttgttttgggaaacaattttgttggtggagttatattcatgcttactcttttatttgtcttcatagcctgcatctccttcagacttcatatctgtttattttcttgtttgtcctctggggtttgggtgttgggtgaccagtcagctggagctggaggaggtgcttagcaaggcagtgaccctggttgggaggagcagggctcagcagggtgaaagtagctgggccttgagtcaggagtggcatctggaaggcctgactgtaagggtcagaagggccagcaggtgggtgtcctaggcacaaacggtggctgctgctgtggactggaggaaggtaagaggccccgagtattccatgttcttactggctccccaactgaggattcctctcctgggctggtgctgtcctgcagcagggaggggttagacagggacggctgcacatcaggccggagtccatgtcatcctcttaggcactgtcactacagattgaggattctgttcataagccaagcctttgcacaaggaagggacccgggctctcaaggaagagcagctcctggtcagacctccatctccttctctctcattgcctgaggcctcaagcttggtctacctggcacaggggtctggatcctcctcccagggttggggtcttactgagctgggcacctgcaggtgggagaagatctggaggggccccatctgccttcaccagattgatgttgagggtccctgagtcctgcaccactatcaggtgctgagcaacttccagtgtcagtgacaaccaccccatggtggaagcagaaccacctcgtgagaaagcacctccaagcctcagtgcttgccatgtgtgggaatttgctggtttcagttgggggcatgttggtgggtggtcatgaattcagggccggattctatgctcacagtgcacatgctggatgtggtacagaccccaggcagggctcagtggggtggttttgggtgtgcacaggtatcttttctggaggagctggtggtgatttggctcccagaagttcctgagctctgcagactcaccaagcactcaatatttgagtgaacattgggcgagagagcagaaggtaagtgtcagggcatcggggttggtgcctctgggaagaggaggaacattctgggaacaaagctctcccccggcttacagggagcttcccatcgctcctgccttgaggatcagggaaactagggcctctgctcttccaggggctgcttgcaggcagtttgctctgggagggggtgacccaggagttgcctctcattttgcatttgagatttaaaaggagaagggacagtatatcttgccaggtcacaaaaattacaggcatcatattgactgaagggcactcctgtcatcactgcaatataccagaatggtcttttaaaaaaataagtgatttaggtttaccagcaactgtaatgcttgttttattcttctagttcaccgttaatgtcacttttgtagttttagcactggcaatgttgattttatgttgactctgatgattttaagctttcatttgttcacatagagatcatcttctttctgaatattaatgcattttttctctatttctactggttattcctgtacatagagtagagaatcacttttcccaaggaggtggaaagcttctgactaccaaaaaaaaaaaaaagtgtcaaaatgctttaaagtcagtaacttaaagatcaaatccaagagtgggcaacagattctgcccagggtctgaaaggtggagaggtgactggtgaggatgtttaaaagacctctcctctctactccctaaatgggggccatccagtgttcttgaggttcagagaaggcccagggctggggcagcagggcactgtcagctcccagctcccaggggccaggagtaagaccccaacactgtccagacactgattgcattcattttgggggagagtagattcttatttaaagaataatacaaaagtctacaaatatgaacataaacagaaattcctttgctacaattttccccttaataagacattccttcctaatgacatatgtgactgcattcatggctgagatgttttctaggatggtgagagcatcagagtggactatctggtgccttggggtcatgcattttcttcttccaatgtctacaggatcccccatgtcccactttgtagtgtaactcagtgtgtgtcattctggtttttgttgtatagatccttggaaagcccatgtcattcctgctgtgaggtacaggcagccaaatggcatcatctctaaacatgccttctcctggtacatcaaattatggaataaatgaaagccattttgacagatattgaagatataagtttctactcttcccacacatgcttctcccaagtgaaggattttactggtgaattgttattagagattagtgtggatcagtgactctgccaggggaaattttgccctctaggggacatttggcaaagtctggaaacattgttggttgtcagagctgggggagggagtcctgctggcattgagtgggtggatggtgctgaacaccctgcagttcacagagccccaccagtttgaccacccaaatgtcaatgctgaggagtggagagccctgctgtgccctcccgcagcttccctgaagcttcccctcacctgctcctcccatgtctccccaccacttccccacttcacccgcctccttacacctcagtcccctccacctgaactcaccccttagtccaaggccagccctgatctccgctctcctggtctccttgctccttagcaggaggcgcccactagatggcgcccttgcccttactggagctcaccgtctccctttccaccctgagacaaatgtggctgcttttactgccacaaccccagccctccacactctagatttgctcagggagcagctcctggacagacctcagggaccccagggaggagcctcactctggagattttgatggcatggtctttgaacttcactgttacccccagtcaggatccaggatgttgggagtgcatgattctgcccggtcccacttcagcaggaccccactgctgagttgtctgtggggacccgggcctctcatctccttcttgcattgcaggagagggatcttagcactgctttcacataaagtcagataatggaggagtgcaggtgagtttgggaaggtggacatgaagagaggttgtgtccctagaggtggcagcagtgagaggatgggcaggtgggaggaacacagcccatccagggttgccagccatattaggagcgacagcctttcctctaagcctccagcctttttcctgaaacattccagaactttccacttcagcacttcccactgaggctcctcaggtctgtccctgagctcccagctgagcctacctacccatctgaaatcctgagtcctgtgtcaccctcgttccccattattctgtgcagttctgtgggacgcccagctctcctgacacccccagtcttcagaatggccatcagcgctgtcgctgtggcaccagggtgactgccgcctggaggctgagtcctggcttcctgacagctgtggggcccgctctaggctcccttgtcctgatcattcatcacctccaggatgcacagcagctgggccagggggaggagcagggacaggtgtcagccaccctgtgtgtctgcaagtcaggctgggggtgtgggaggacgccaggaatgactgaactttctgatttagagggtgagagcttgcactgatggaatttgggatttaataggaaaagcatagcgttttcctattttgtaggcagggtggctggagtttggaatcatagattcccctgggatgtcactgtggacctcagtcccacccgttaggggcacagatttcagaatccacaccctggggcaaagcaggcatgggaggctccatcagcctggccagggctctctatttgtgcagctgctgcaaggagatgtgcactctgatgggaacagtgctccctcctccttggggggcagtatctagctccctgcagcccctctccctgcaggccctgccctctctgaacctcaccttccccaacccgccccccgcaatcccatctcagctgtaatcccaacactttctcatccattatgggtggactgcttgagcccaggggttcaagactatgctggctggacaatatagcgagttgttgtctctacaaaaagacaaaaattagctgtgcatggtggcatacacctgtagtcccagtcactcaggaggctgaggtgggaggattgcttgagctggggaggctgagttggcagtgagttgagattgtgccactgtatacttcagtgtaggtaacagagcgagaccctgtctcaaaaaataaaagtaaaaaaaaaaaaagaaatatggaatacattattgttaactctaatcaaccatgctatgcaatagtccaccagtaataccagtaatagccaataatgaattatctgaaaaagaatacaatttattcttagctatctactgctaaaatttttaagctatcttttatgatagctgaaacaaaagaagtaaatttaaccaaggaagtaaaagacctttataatgaaaactgtaaaacattgatgaaataaattgaaaaagacacacgcacaaatagaagatattccatgttcatgaattggaagaactgatattgctaaaatgtccttaccacccaaagtggtctacagattcaatgcaatttctgtcaaaacaccaatgatattcttcgaagaagtagaagatcctaaaattagaaaccacaaaaattcctaaaacctgcacaaaacaccctgagttgccaaagcaatcttaaacaaatagaacaaagctagtggcattacacttcctgacaatcaaagcatactgcaaagctatagtaaccaaatcagcatggtcctggcataaaaacaagcacatagatcaatgaaacagaataaaaatcccagaaataaacccatgcatctctagctaactgattttcagccaaggagccacatgcacacaatggggaaaggacagcctcttcaataagtggtgctggggaattggatattcatatgcagaagaatgaacctagaccctatccctcaccatgcacaaaaaattaactcaaaatgtattaaataaagacttaaatgtaagaactgaaactatgaaactactagaagaaaatatagggggaaaatccatgacattggtctaggcaaagagtttttggataaaatctcaacagcataagcaacaaaaccaaatataaacaaacgggatttcatcaaactaaaaagcttttatacagcaaagaaaaaaaaggccagcagagcaaagagacaacctacaaatgggaggagaatatatttgtaaatatatacatatatatttgtaaatatatacatctgataagaagataatatccaaaatatataagaaaattatgtttctgtatagttttatctgactgggatacagaggccacatccacagtcccatcctcaaaggccacttgttcccaaaatgtcaagcacatccctcaatgatccatcatcaacacctatgtctgtaggatgaagggtgaatcatgaagcactaaaaaggaagaaggaagccaatcccaaaacaaaatgatgcagggtctggaaagtccaaagcattttttttttttttttactgcatcttcctcctttcttctccacattcccaatcctcactattgattaacaaaacaaaaaaaactgggacccaccatcttccctactgtcaggagatctagcgagattgtttgagtcttagaccaaactttgccataagccaaatttctggctgactttacaatgatatgagctagcacagtctctttttctgccagtcaacttgtgctcggttttatttgcaaccaaatagaggtggtaaccaaatataggtgaccctaaaattagtcatcaggatgaaatcctaaaatgtgcaacaaactgggttgaattcaggattagtagcaacatctctgttgtgggcttgaaaagggggcacccttttatgcagtagcaaaattgctaaattgttgtttgctgagtctttggactctcatcccggattttctatgaccattcaaacagggctgcaatgaacatctatggttgtttagcttggcacacttctacatttctatatagtaatatctagaagtgcatttgctcaatcacaagatatgcacattttataattgactgctatcgaactaccttaaatagccttaatttgttctcaacattgtttaacagggtctgtttaatgtcctacgtccagcaaggacagtatcacttttcttaatatttttcaaattattggaccttaacaaatacttaatgtgcaattaattgattcctttgtattcccatgccttcttttatatgtttccttatagtacacaaaaccacattattgtttctttacttgtgtcattccaccctggaccattcctatctaaactataacattatgagagagagagagagagaaaacaatatgaaaatataaattgattaatcaaaaaaatttaaataggacaaatcaggaagacacaagagagattttaaaattattcagagaataccacaatagctgtaccaatatattttaaaacttagatgaaacggacaactatctcgataaatgtaaattaccaaaactgactcatgaaaaaatggatattatgaatagagcaataatcagtaaagcaattaaaaagacagttgataatttttatttactgacaacaataacaaaatttcaggtcctgatatttttatggtgaattttaacaaattttcaagctcctcctcaaccaattctcagaaggtttaaaactttaacaagaaaacactttctaacacattttcagaagctgttatagcatgataccaaaaccacacaagaaaattatagaccaatctcacttacaaatatacatgcaaaatcaaacaaaatcttagtgaaccaaattcagaattaataatagcaaacaagcaaaatatgttatcatacgtatggcttatatcaggaatgcaagtatgtttcaacatcagaaaatacttctccacattaacagactaaaggagaaaaacgcttgtttaattatctcaataggtttttagagaattttgaaaattttataaagttatgcgtattctgtaaaattgatgaaatccaaccttgatttatttttaaaaattgcctttcctatagaattataggtaaaggaaacacatgcatcctcacagagctacttcaaggctaagttacttcccataagtaacgtatcctgtaatgtgtgcttggcacatattcaatactaaacaaatatttgcaaatcctcaaaccacttctcgctcaaataacccacctttgtcttttgcctttatgttagggttgattttctcaattgtatcttggagatcctttggtgggtctttcagcaattaccctgaatttgcttttctgtttacaattttaattcctgggaactctttcttgttctctgactgcacccttttcatgagagttcagccatcaatcctccagaaccccaccccccccgcccccccaaaaagcaataaagatgtctaaaagcttccttctgggctttcgaatgatgtttaccccaggcatttgttctattcgttcatcacccattttccctacaacttgcctacacttgatatcagatttttatttattagtcacctatcttcttcattggcccattttcctattttgccactggttgttctcaaatgtgttatgattcctggttgtacagtcaagtggttgataatcttggatatacgataaagatttgctctgtagctgtgtgtaagcctatataaaagcttttgtatttttcttcttaaaaaagacaaaagatggttgggaagatccctccagttcaccagttcgaggctgcagtgagctatgatagcgccgctgctctagcctgtctgtctgtgaaaaacaaggggggcggggggcgggggggaagactggagatgtaaatctcccgcagggccctacccgtatccgcaacaggtctctaacaggaacagcctcaggcctgtgttggaacaaggtaggttacagaaatctggaagccagatctgtaacttcagggtaaggactggctctcagggctgatcccccgggctgggtgtcccagaggcacccgcccccgccccttccccaaggcaggccaggacaccttcactcctctccttaggctccccacccccttctcctccccactgtgcctcctggagtagcggtggcggtgccacaggggagcggggcggggcgggctctgagggcaagggggatgggccccgccggggtcactggcggccaccctggaaactcgacgcaggccggcccttctagtgaatcgtcccagccacagctggcctcccagccgcgcttggggcgcctcggggcgcgaatggtgcaggttggggagactcaccacgcaccgtcgggggtcggtccggttattcctcaccgctcggctccagtgggcgcgcgggcctctcctcctcagttcctgcgctgcagtccctccctcacccttcgcagcttgggaatccaactgtgtcattccgacggagcgccgtgaggacctccgagggtgttagcgccaagtgatctctgtccagcgctctgaatatccaagtaaaggagttcaatgaagggcgggtcaacggaggagaaaccgtgactctctcaagggagcccaaggcctccttgtctaattagtgacgcgccaatggatggaggctcttcccaccatctcttcccagcatccagtgacaccaccgccaagggacgggctcggcggaacctgcaggaaagaagcatcggctgagcctgactgcagcgctgtgaagagacaggggaggggatcagtagttggtcccgcgcccaccccctgtttccgcgaggggcggagttgactggccatgcaggcagagggcgaaatgtgaaattccactactcctaccgtttttccctgacccgatggggcggagtgtcgtcaggctaagttccctggcggtaaggtggggagattgaggcgcacacctgccgaacggtaacgcaggattagctaaggcgagctcaggacagaagcctcccgaggagcaggagggcaaaataataaataaataaataaataataaataactcactccttggtctttatttgcggcaggaattcagaaggtgaaagcggggccttaggatctttctgaccttttgggttttaagcaggaggtgtcagaaatgttaccacagggctagctggcttgtggccagcaagcgttcacaatgccctcgatttttcatccctctctgtgggttctttttttcattgtaaggcagaatttctacgattgctcacccactcagagaacctgagctggtttagaccaggtgagacaggctaggtttaccctggtgatgatgtgttgttgccatggcgatcctgcccagtaccagaggccctgcagattcagatgcttggtgcctgtgcttggctgaggggccaatgggtgaagctgccatctgcgggatgatgactgaagcctctaagtcagaatccgcccaggctgagccttagggcagctccatggagcctcggctggcctgggatagagagtccaccactgtgccagcccccagccactgcctaggtcctgtgctgagagccccttgtccagggaaatggcgtccagtggaaaagggaccacccccttgcccttcactcaaggcaggttggtgacaaccctgaagctaatccgttcctagaggagctgcttctgggtccgagttttctctgcagcagagcagctccctggatgggatctgttcaaagtccgcctttcacgcggaattttccgtccttgcaattttccacctccaccactaggggatcctctctgaccgcctcatgccggctctggcctctgagcaggggtttctcttctgcatgtgcgaccttgcgcatgcctagtggccttttgggacctagagctgctccacaccccgatggggttacagagtgcctcgcctccactccaccccaccagggttccttccctggctgggatgggatttcagaagcgccgaggaacagcccagacaggtgtgggagagtagccaaggcccctgtcccggggtggccaggacagcggtggcctcgcataggacctggctgggctgctgcaatcagtgtcctgccccttggagagcaacagtgaaaacaacaagactatcttcacccaccttaagaaagaacagaaccagtatccccaactctgctgtgtatcccaacccaattccattccccaccccactctcagtagccaatatgcaaaatattagaatactcttactgttattattttcaaccacactctgcatcctgaaaaaccatatatttcgttatgtgcttttaaacttcttgaaaatgaaatactgaggctgggcgcagtggctgacacctgtaatcccagcacttcgggaggcggaggcaggcggatcacgaggtcaggagatcgagaccatcctggctaacacagtgaaaccccatctctactaaaaatacaaaaaattagccgggcgtggtggcgggcgcctgtagtcccagctacttgggaggctgaggcaggagaacggcgtgaacccgggaggtggagcttgcactgagccgagatcgcgccactgcactccagcctgggcgacagcgccagactctgtctccaaaaaaaaaaagaaaaaagaaatactgaattttcaaatacttgctttttttttcggtcaaaattatgttctcaaatttcactcctgtagatgtgcgtggctggctgtagtttttgcatttttattattaggtattctcctgttgcattaatatgccacattttatttctctcatgtttttggtgaccacttggggtgttttttggttttgtatttttgctgtatacatgctgccatggtggacatacctctttatacatatttcctgttgtatgcagacacaattttaggatgtgacatcttcagcttttctattgtgtcgtgtgtcttttccttcgtgctttgtgttatttacatattctggacacagattctttgtcaactgtatgtgctgcacatctctttcccagtttgtgtcttcttcttcttttttttttcttaaaaaaaactttctttatagtgttttttttttctttctttctttgttttgttttgtttttttgagatggagtcttgctctgtcacctaggctgaagtgcactggccgatctcggctcactgcaacctccgtctcctgggttcaagtgattctcctgcctcagcttcccaagtagctgggattacaggtgcctgtcaccacacccagctaatttttgtatttttagtacagatggggtttcaccatgtttgtcaggctggtctcgaactcctgacctcaggtgatccaccctctttggcctcccaaagtgttgggattacaggcgtgagccacagcacctggcctgtgttctttcttaagtagatgttacttttaatataatagaatgtatcatattttgcttttatattagtactttttctatctaattcaaacacatccccaagggtctttgtgtgtagactgaccaatttctcaagaatcatgaatgaatactgcttctctttccccaatttatctgtaatgctacctttattataaagtttctatgcatgtgtagaaatagttcctgatttttcactctgtgccaccagcataccaatagcacgctgtcttaaatattaaatagcagagctttatgagacaacttgatgtgcagtaggcaattgcccccttgttactcttcttcagggttctttgttgtaccacatgaattttagaattggcttgtccagctaaaagacaactgcaaggattttatttggaagttcataattctatacataatttggggaaagtattttcataataccaagtcttcctattaatgaacacagactctctctctctctcccccacccccacctgtttagttatttatatctttatggtctgttagttattgtttattgtctttcaaccaggtttcatgtttttctacatagaggccttgcatgtgaaagtctttcttcctagcttgctattacaaattttttttaattgcactttttgggtacagtggcttgtactgtaatccccgatacctgggaggctgaggcagatggattgcttgagtccagaagttcaagaccagcctgggcaacataatgaggtccctgtctcaaaaagtttgttttaaaaattgcatttgctgttattcaacaaatgtcattgtgtctcatatatggatttttatatctgataaccttgttcaacaatcttttgattctaacaatatatcagattcttttgagttttccatatagacaataatgtcatctgtaaattataattgtttcttctttgttatttcttggaccttttattttatatttttgtcttgctgcaaggcaatatccctctatatattgtggggtcttttttctcataaagtggggatggtgaacacccttgtcttgctctctgattgtataaagcatgctttctgtagcattttgtagacgctcttttttagattgaggtaattcacttttatttctggtttactgagtttttagcataaattcaggctgaatttgagctaaagctttttctggagacatcatttgaaaaattcatatgatttactttctttaagtcaccaaagttatgatttacattgaactgagtttctactgtttaactgtattcttgggagaaaacccacttgtcactgaacaatatctgttttatttactgctgtcttgtgtctaaattttcttttaggattttttgtatatgctcagattagcctgttattctcctttctgtatttttttctggtttgggggtcaaagttataatagcctcacaataagagctaagaaaccagccctaatggaggccggggcaggaggtttggagttcaagaccagtctgggcaaaatagtgagacccccatctctatgaaaaatagaaattagccaggcatggcagtgagtacctgtagtcctaggtacttgggagggtgaggcaggaggattgcttgagcctaggaatttgaggctgcagcgaactatgattgtgccactgtactccagcctggatgacagagcgagaccctgtctcaaaagaaaaaaaaagaagaaataaaaaggaaaagataaaagagctaagcatctgtttccttttttccattttctgggagagtatgtgtaagactgtaattaactgtttcttgaataatgggagaactctgtaaaataatctggctttggtgttacctgtattggaaggatgaaaaataccaattcagtttcattattggttgatagggctactcatgctttttgttttgttttgttttgttttgtttttgagaggaagtctctctgtattgccctgttgtccaggctgagatgcaacgttgttcacaggcctgatcctggctcactacagcttctaacttccgatctcaatagatcctcccgcctcagccttcccagtagctaggactacaagcatgcagcatcacatccagcctcttttcctgcctgacccagttctggtttcctttagttttctaggtgttcatccattttatctaatgtttaatgcatttggcataagggtgctcagtgtcctttcattgtctgttgtctgtaactgttgccattttcattcctatttatgagtactggcgtcttctctcactttttcttaataatcctgctggaactttgctttttaaagaacatcttttgacttgttgattcttttttcatacatattaactattttcttattttttgcctttatatttatttcttttcctgtttgaaacattgctcttttcttactataaaaatgggtaagtagctcatgaattaccacctcttttaaaaatcttttctactgtaagcattttagcagtttacatttgcccacaagtaccacttcagctacaccctatgtgcttttacataaagtcttcatttttggtaagacatattctcaaattttaattatcacttgtttttaaatccatgatgttttatttgaaatgttgtttctaaagatacattttctggttatacttttattcttctaatttagcacagtggccacaaaacatggtctgtgcagtgcatacaatcgatgagtaatttctgagctgtagtatttggcataatatatggcaaaatttcctaagttttccatgtgtgctttaaaaaacttccagtaaaatacataaatctgttagatcaagcttctcacattgttcaaatagtctatatgtttactgattcatttgactgcttgatttatcaattacaggtaggaatgtattcaaatctcctattaaagtgtgacactcaagtggctttttaaagacagagatgccaaaccaatgaatacatgattttccccaaagcctgcacaaattctctaatgaaattttaccatgaaagtttgtttaattaaggcttactaaagcagtatgttgtcttttactttttaaacagagaatatatattttaatacatcgtttaagtttatgattaattatctattactgaggataagaatctttgcctgtgctcattcagcatttgcacttcatttatgatctgccttctcatagcttctgttaatttttatactagagacatttatttgtttgtataaatgttgaaggtttttttttgttgttgttgtttttgagtcagagcctcgctctgtcacccaggctggagtgcagtggcatgatctcggctcactgcagcctccatctcctgggttaaagtgattctcctgcctcagcctccagagtagctgggactacaggcatgtgccaccaagcaaggctaatattttgtatttttagtagagatggggtttcgtcctgttagccagggtggtctcgatctcctgacctcatgatctacctgcctcggcctcccaaagtgctaggattacaggtgtgagccaccgtgcccagctgggttttttatattataaggagatgtaatagatagatagatgtttcaaagatagtcaaatgtttttaaaatttaaaacacttttttacaggttgactttcaccatttaatttcatctatgtgttttgccttagagaaattttaaatgctatgtagatctcatgacttataattatgaagcattttgttttctgttttccacgaaacttagcttaactttgagcatataatagttgtaaaggtaggagagtaacactgaaaaaaggaattgcataaaaatggcacattttctgtagagttgtttatcgcctgaaaataggccccatttcatggaagtaagatgatcaggctcaggtccccagacgaaactcttggcatggtttttggagatagtccagggctcagtactggctctatcatttgctacttctcccaaagtaaccaatatctcatccaccctgagcccatttccatatctctaacatgaggataatagcatctaccttacacaccaagtagagggatcaaatgtaggaactaaatcaaagtaccagcactgaataacctacatcctcccacttcccaaaaggaagagagatgtatcccctgttgacaaacgagaccattttgcaggagagaaaggaaatgccagttcacttgcaatgtaaacatgctctctctttttagggatgtccagggacctgagagagaacccatgcttaccaaagagtttctagttccagacacacaggactcgaagggtgacaagtatggttttcagggtccctgaatccacccagtcctcacagaaactcctaaaagctgtcgattgacagcgttgagttcacagctctggtcctcacatgctgatactgcttgtgatatcgaacccgacaggaccccacatcacaattgatttaccaactacaatataatacctcctgaatctccaaattggctcacccaggaacaaaggcttggggtaaaactggattaggagatataagctctgaattttctgagggtgagacacacaaggattctaagtgacacgccacagagtaacgggtctgtgactggaggacccacagatttgtcttactggagacaccacatgcacacaaactccatccttagctgtggaaacaagggtcttttgctatcttagccgaattctgggagtaatttttggaggggaggagatctttgggattgcctctttcaggccctttacaaaaatacctacttcttaaatggtaaagcttacactaaactgaaaaaattacatccttggctttttatgaagtaggtgttggattgaatcactactggaagaagtatggcatcgcaaattctaagcagtggtcaaaggatggatctgttaaattagaaaaatctctaaatttataaaaagattttagattcctttattctaaacaattgacctatttgtactcatgggacaatcaaatttcaaaggagatatgtaacgatttcatggcttgcattaaaaatccttctgataaaattaaagataaaaaatctgaccccctgccaaaaaaatcttttgaagttcatactgcctgctttcaatattctgtgggattcacaatgaaaggtgccttatattgtggcctagcttcaagtttatgccttcgccaccatggcctgggttcaattcccagtcagggccccagcgcctttggtttaatgtttgcgtggcatttgacttttttacctatttagtattggtgagattacctttggtaaaaaaaagtttaaagagtggaaatcgcaattctttgtgttggctaaaatctgattataagagatctggaaggttttatttttctttttcaaagagctctatggtcagaagtcggcttcatgaaaagctaatatttaattatatgtacatacagtctttctggattttctcttttgcctcctgttttgaaaaatatttggatttgagtgaaactccgttttagaaattaattgcttggtacaatatacccatgtaactaccctgcacatgtaccccctgaatctataataagagttgaaattttgacaaaataaaattagattttgaattaaaacaaataggtgcttggttcctctgctcacttctttttaaaaggaattcctctcccatgtacttcttcttttcccttctttaccttccttttggcatctttggtatcacatgaagggatctagagggaattttaagtgactctgaaattccttgagaaatacacaaaaagatcccactcaccccttttgggggtctcctgttctccttgtggagtccagagtcagggacaggctcctccaggtctgcagctctgctctcttttatttcatcttggctgattgctttggttttgtgagtaccaggcattactttgtactgtgagagacacgtcctttgtgagtgcaacggctgctgggtcactggtgagggctgcagtttggagatggctgagagccgttgcaataaatggttgtgattgcagggggctccttgtttctttgcaagtttagatgagaaaggtgcagtttggacacagtttaaaggctgtgaaaacaccaccaatgaatatgatttcctttggggatggtctgattaaaagtgggctgattgttgctgtgctactagccttgaagacatgtttctacagcattgtgcagtgtggaaaaattgtgtggcttggtcttgtggcatgtcccttcttttagagacctcagattcaatgtgaaattcgggatttttgattttcaaagatctagatgccctgccttccagatgtgcctactcttcacatattttaaaattagatcctataaactgcaaatactttgttggcttctgtgagatcagaggtccagttagaaaaggaagacagtttgttaaaattaaaaactatttatctaatctaactagattggcctccaaatatgactttctgacattcagctggttactctgaaaagatttctaaatctcttgaggctcatctatatgtttccttgcaaagaaaaaaaaaaaaaaaaaaaagcaagcccaagcactagtaagaaaaagatttgcaatgtttcatgaaaggagtagatgagtgaagcatttatttgtagatactgggttggatacctgtgcaaagaagaagaggtcaataataaaaattgccaggggatttcttggaacttaacaagctgaattaaatatagaaatgtcaggaaatcaaggcaggaaatactcacttgtggttaggcagacagggcagggttctgagcttgagatggagcaaacagttgtggtgggtgaagttcacatgctttagagctcagctgtcctagtaaagaagcctaagagtctctaaagctcttatgagaagatggattttttttgcctagattaaaaggttaaagaattgctttaagttggataaaataaagctaaatgtttaagcaagttgtgaaaggtttatgaaaaaattaattaaaatatttttgtgtgtaaacatattgactaaagttgaaggggtataattcagcatttctgtaaattgagcattgaaataaaaacacaatgggtttctcttagagcactaacctgctctttaacaaaaattgtaaagggttatagaaagtctataaaaatgttaccttatggtcaaacattaaaattgggtaaatatgtctatcaggttttattaagaattaggtttaacattaatagtacactaatgtaaaggtgaaatttggcttatttggtacaaaaatcatacaggaagcattgtgaaatataaaatgatttttagctttctttgggctatatttctataaatatgttattgatgagggttccaaagttatgggagactcctataattctgctatatctcagtgtacattatcagtcataattataattgtcatgttaaattattgtgggccacagaggtaacagatttccttgtcaattgtgtctttgactatgactaccctaaaacgttcagtcacccatatacacatgttaccttgttttggccctctttagaaggtaattttataatcagctataaagccctaacaggtgctcttaaatgcaaattttgataactttggagattgtgacatcagaagagaggaaaaatgttcgggacacttggagagctaaaatgttcattgatatcaagcaggacaggaattaactgcatgaagtgaactaataggaggctgaagtgatctttttgactttttgcttaaaacgttgctgatcctttgttttgcttttcagagtcaaggcaaattttcttttgagctattgacagcttttaacgattaatcaaaatatactcctatgaacaccatttggagcattatttgtttctctctacccgatttccccagaatttggaaactatttgtgggtattcttaatttatggcaatatagttatttgcataagtgcaataagaatgtgttttctttggtaacaggacacaatttgaaaaactggttattttaccaaggttttgaccagaatgctgtgctttcctttaaggaatcaaacttgacttgtggagctaataaagcctttggaaaactgaccttatatcctgtgaacacagtccctgtacagggttactgatctgtgggaagaaaagaatgtcacattctgacaggtcaggaatcccaagttatcttgaaacttcaagaggacaggaattcacccaaccatatgtatttgatggtagaaatccatggcaggggctcagctttaaaaagtcttatctcagattccttctataaaacaaagtcccattaaaaccaattttaaaagcctatgtgaaaaataattattcttgctgcacctcgtacaaataaagtggcaaagcataataaagcaaattggtcctgtcgtaatttgtctttagtaaaaacgggaaactggggtcgggtgcagtggctcactcctgtaatcccagcactttgggaggctgaggtgggcagatcatctgaggtcaggagttcaagaccagcctggccaacatggtgaaaccccatctctacaaaaatacaaaaatgagccgggcatgatggcgggtgcctgtaatcccagctactcaaggggctgaggcagggaagcggaggttacagtgagtcaagatcgtgccacttcacgacagcctgggtgacagagcaagactccatctcaacaacaacaacaaaaaagggtaactggagagagggaagttatgtttcaaaaacttttggaaactatagtacacctgtttttaaattctagtctggcattcagtttttattattttctacagtttgggttaaattcgtatttctctggctacaagtctcctaaataatcttttcatttgtttcctttttctttccctttttccccatttttcttaattggaaatcactgaaacctaagctgtgctttcttaaagccctgtgaactgaagactagacaaccgaaacttctgaaggaagtagcagcaacctatttatatgtgttgctgttgcctactattatgttttagcaggtgctgcctctacacccccgaaacagagagtgctactgggaacaaatcgactttttccactccagtgctgcattcggtgccccataacgatgaccccctctcagcaggaagtagccagaaagattacaatgctccatctccctatgattcttgtgataaataaatatacaagcatgatagaaatcatgcgcaaattgacagtggggattgtggcaggccagatttcactaatggaggtccccatcacaactacttcagtactgactgagtggttaagttcagtatcaaaagctgaaagtgccagcgcctttctacaaaggctagaatgtaacaaaagcccaccaagggttttacctaggcctttcctgggccttacagcatgacaaaacaaagaaggaattcttaaccagacctgtttaggattaaacaaatttaattgggggtctgaagaaactcgccaggcctccacaaacaagttcattgggggtctaaaggaaccccccccaaacctctgtgattgagcaggagacaaggtcagggtaattgccccagcacctggactcatttagatttaagtaaatgtactgaggctccagagaaaggtctccaagacttagactagagttacagattaaaagaagttaatcacttatatctttagataaatgcacactgacacgtagacatacatcttagaaaatatataagctctggaaaaccttgtaatttacagttggtctggagatattttctgggccttctctctgtaaccggttccagaaataaaaaactctcttcctccccagtttatctgcatctcgttattgggccgtgagaaatagcagccagaccctgagtttggtctgggaacacactggctgggcttcctgcctggcggtagagcttcactgtcctccttcccagccaaaatgtggcccttgaaggcttcctccccaactgaccggttttgggttctaggtactcagggaacaccgtcttcaaggaggccattttcatactgttcctggtttgatttttctgaaattaggaaatgccccttgaggcatccaggattgtctttatttcccctgaagcttcccctcctgaagaaaaaagttctcaaacaccctcaggactcaaaccccaagttcaccctgtgaaacattcccatttcctaaacccaggcaggctcatggccctcagcctctcagaccccatggaaacctcctcccccacttcacgggttctctccatattgagagcctcccctcctcggcacacaacccagagactcaccccaacatgtgtagcaaatcaccctggaaacaatcatggctgaacgtggtagcccatgcctgtaatcccagcactttgggaggcccaggaggtggatcacctgaggtcgggagttcgagaccagcgaggccaacatggtgaaacctcgactctactaaaaatacaaagttcactgggcattgtggtgtgtacctgtaatctcaactactcaggaggctgaggcaggagaatcacttaaacctgggagacagagattgcagagagccaagatcgcaccattacactccagcctgggcaagaagagtgaaactacatctaaaaaaaaaaaaaaaaaaaggaaaaggaaaagaaaaaaaaaatcatgaggcaacattgcatttaacaatattttatttatcaaaagacacttgtctttctcaggtaagtgaaggtctagagatgaaacgagtcccgatgtaaattgccccatgggcattgctgagatcacaagatcatcactgcagcatgcagcacaatagtaaatttctcaggatggaagttcaacaatccaaaaggtagtattttttttcatgatgctcagtccatcatacgaaataaaaataaattccttttcatgatcatccattcagtagaaaaaatgatagtaaatttgttctcatgaagatttttaccgtaacatataggatttatcgttattattattattctttgttttttgtttttttgaagcggagtctcactctgttacccagtctggagtgcagtcgtgcgatctgggcacactattaacctccacctccagggttcaagcatttctcctgcctcagcttcccgagtagctgggattacaggcatgcgccaccacacccggctaattttcgtatttttactagagatggggtttcaccgcattggtcgagctggatttgagctccggacctcgggtcatccgcccatctcagcctcccaaagtgctgggattacaggcgtgagccaccgcgcccggcctcaatttatcattattcacgcatccacaaactgggttcttatattttgtacgtgattttttccattgaggagagatatctgtgcatattcatgctgctcatatttcatccacaaactcggttcatatttcatccacaaacataattttttccgttgagaagagatacttgtacatatttatgctgttcaaattcacatttcatcattcttttacaagaaatagataatgtattttaaggttttccagtggtattacagatattttactgggtgtatagatagaaattaaaccaaacttctttgttctggccgccagtcatgcatcctgttttcaacatagttcacatacaactggttgtgtaaaaatgaaattattttgtttagtacaatcatcaacagttggttgattagatttttaattatcaagttaatcattgtcattatgcttctcatcgcactcgtcattaattgctgtgggaggaaatttgttatgttccctatgagagggtgtatcacaaattcaaataagaattcaacgacaatggactgtataaaggaaataagcaagtccatggaaaacatatttttttccggaaaggattaaaatatttttaaaaaggaattaaaaaaaaattgggcacggtggcaaatgcctagagtcccagctgctcaggagatggagacagaaggattgcttgagcccaggaataagttggaggctgtagtgaacagtgattccaccactgtactccagccagggcaatagagggaaaccctctttctaaaaagacaaaaagaaacaaaacaaaacaaaaaaacaccacatcaaaaaacccaacaacaaaatgaaaaaccaaataacagcaatacaattggagctattcgatccaaagaagtaaatgaaacataaagcaaataaaagagaaaagctaatacctgtgtcctgcaggactcagtccaagttctgctctgactccctcctggtgagccaccccttaaaaagtcacttggggcggggttactttgacagacagtcttctgtcaaagagggaggcggtaaatagcacttttttttttttaatttaacgcctttccaacaaattagcggctatgttgtctaagagtgcaaatgtcagaggtgggtacaggcagcaagaccctccccacaggggcagcagaaggaggaatgactaagggaacaagactttagtgtgctcaactacacaggacaggaaacagatgctttttacaaaagctggtggacttgaaggcagaatattttcaagttcctgtaactgcgaactatgacctgtagcctgtgagagtgactttctgtggcaaaggagcttttgtgaatgtgaggaagttaattatcttaacagtgggaggttctcccggcttatctagctagaccctcgtgaaatcccaagtgtccttaggaaggggaagcagagagagatttgagtccagaagaggaagaaggtgatgtgaggcccagtaggggaacaaagggcgatggcatgtaaacacttagcccccagaagtgggagagggctggggttcatcacaccagaatccctaacaatcagccttattttaattacccttgaaatggaaggaggccttagagagccagaggcttggaggggcaccctctgctgcatacacagatcccaactgctgtgggctccaaataattgcaccagggaaatcacaaattatcaaaaataaaggatgtaaagcttttaaaaaatattaaaagcccaacaaataaaaaaagttctaaatctataaaattgacctcagtctgtatatttagatgagtcatgtgtatatagcgtttcacttcaaaatatatgataaatctctcattcattggcttaaaaataaacacttcaatcaagtctttatcagaaaaattgaaacgttaactcaattgccttttagttcatgtgactttacaaaacttaaaacaataaagtcagttttaaaaattattagtaaagtaaaagaaaaatatcttcacaatgtagacattttgtccacatgagacatgtgaaatattgccattactaaatatttgcaggtcaaaaactgtttccaaaacattttaaataatcatctggcctgtctgttttagagcattcaattctagctgaggtctggggacatgtgaaaggagccacggcccgactccgtgctgggaagagtcagacattttccacagctctgtcctttgctgtgggctctgcaactcctaccaattaaaattgcttacgtttttgttttatttttactaaagaggggttcctaaaagctaacattatactgagtatatgtaactaaaactactaagaaaacaatttcacaattatacaaatgtgccaagtaaatgaaaaaataaactgtattttaataaaggttataaaaagaaaaacatatagtggtgtgaggactgtctcaggtcttcactgagcaagggatcatgacattctatggcggacagctgaccttggctttctgctcctcttgattatgtctactaagtgacatacttactctttttccacctgtcttgcctctaagggtaacaggttttatgagatccctcctagtgctttgcaggtcagcctccctttgctgcattccaattttactgcctataccctccagctggcttttgatgacaaaagtcctggtcccagccattctcagattctgtcatccccgtgggcactatggagctcagcactatgggaggttccccaaaaatctcgttttctatgaggaatggccaccacctgcatctcagtgatgctagtgacccctttcctactcctgtgctcactggtcctcatgaagatcctggttggtctgtagccccctatttttcctattaaagagaaattacagtaagacccatttgtgtgcaaaatcaattttaggcttattacacttggcctgataatttgcataaaatgcagcaagaattcatcggccatataggctacttttgagttaattttcctgggtttttacctaaaaatatactattttggttagagtcttgtgaaaataaccaatgtgttcaattgttttattttaaaaggctcttactgaacactataaatatgtataagttgaatatacaaactatattgtcataaaatcacaacccaaaatgtggagaacgcagagggaaaggtaaatttgctcgcaaaaacatacttcacccaaataactggaaaaaaaaaaagactttcatgacccttctttaaccagagcagcagctttcaaacaaggtgtttgccttggaaatgccattcacaagccaaacggcccttgagagctgtctgtcaggcactgtagaatctagcagctcctcacagagttagaaatagtttcaggaaagagattccctgcttttagtaactgcactttatattcccagatagcgagattgtatgtaaaccatttttatcttattctggaactcttttgggtactttttttttttttttttaaatgatggagtctggctctgttgctcaggctggggtgtagtggtgcgatttcagggtatgagaaaatgcagctggacctggctctttccaggaagaccctcacagccaaggagtccaaagcctggggttttcatctaattccagtgtgactggggtaggagcagctttggtgctgggtgtgtgtgtgtgtgtgtgtgtgtgtgtgtgtgtctatgcctgtgtctgtttagggtgttaggctcgtggttgtctagatacaaatgtcccagggctcaggagccccagggttatgtcaggggcaccagatgaaggtgtcaacagaagttagggcacaagggacaaaggtgagagcaaggttagattcatttaggtgcaagaaatcatagagggaggagggagaggaagccctcctgctaccaccgaggaagaagcgcagcttaaggcagaaagcctgtccggagaggaagtgagtttgagggcagggctctctgggtaaagtacggtctgggacaccagcctgggggaagggtacagaatgcagagtggcctggcgtggggactaagaacagaggagagcagctttcactgggagggtcagtgttttcagtgtccagcactgagcaaggtgagatttgggcagcttgctgtgaaataaggtcaggctctggcattgtccccattgcgtgtgtgtgtgaggggcactttgggagagtgaactctccacctccatcctctcatacgtccttcaaccgagcttgccagttaccctgattccaaggagatctatttattgttgacaatactggatcctagcagaggctgggtaggagcctgggcacaagcaagtggaggagggggcctgggcctgaaagacctgggaggtttgagagaggacacagcccacagaatggagcagatggggtagagtcggcaagcattcagggctcctagtaagttggacaatggagaccctgaaagatccagtaaaacggggagaacaaacaggtccccaactcacatccttgcagtgcctggagcttcagactccagacaggtggggaaggaaaattgagggatgtgaacatgttggagaatgtcgtgccctgaagaatgaagaaaaggggggtgaggaatgagagcaggaacggcttccagtgcctggtgcccaggagaactcagaaaatgggtgtggtggagaggaatcgaggaaccggaagtggtggaagtgtgcagggcccctccgagatcactgtgactgccaggcgtcctccctggctggagagcttcactgtcctccttcccagccaaaatgtgtcccttgaaagcttcctccccaatggactggttctgggtcctatatatttgaaggggtggcctgcctctccacacctgtgggtatttctagttgggtgggaggagagacagagaaaagaaataagacacagagacaaagtataaagaaacaacagtgggtccaggggaccagcactcagcacaccaagggcctgcaccggcaccggcctctgagtttcctcagtttttattgattattattttcattatttcagcaaaaaggaatgtagtaggagagcagggtgataataaggagaaggtcaatgaaaaacatgtgagcaaaagaatctatatcataattaagttcaagggaaagtactatgcctggacgtgcactcaggccagatttatgtttctctccacccaaacatctcagtggagtaaagaataacaaggcagtattactgcaaacatgtctcacctcccgccacagggcagcttttctcctatctcagagttgaacaaatgtacaattgggttttacaccgagacattcagttctgaggggcaagcaggagacagtggccttcctccatctcgactgcaagaggctttcctcttttactaatccacctcagcacagaccctttatgggtgttgggctgggggacagtcaggtccttctcatcccatgaggccatatttcagactatcacatggggagaaaccttggacaataccccgctttcaagggcagaggtccctgcggctttccacagtgtattgtgcccctggtttattgagactagagaatggcaatgacctttaccaagtatactgcttgtaaatattttgttaacaaggcacatcctgcacagccctaggtcccttaaaccttgatttcatacaacacatgtttttgtgagctccaagttgggtcaaagtggctgggtcaaagtggctggggcaaagctacaaattaacaacatctcagcaaagccattgttcaaagtacaggtctttttcaaaatggagtctcttatgtctttcctttctacatggacacagtgacagtctgatctctctttcctttccctacatatattcatggaccacagtcttcaaggagtccatttcctcactgtttttggtttgatttctctgaaattaggaaatgccccattgaggcacccaggattgtctttacttcccccagagcttccactcctgaggcaggagcttctcaaacaccccccaagactcaacacctaatttcaccctctgaaaccttcccatttcttaaatccaggcagggtcatggtccttagcccctcagatgctgtggagaccttctttccctttcatacattctctcaagattaaaagccacccctcctcagcacacaccccagagactcaccccaacatgcattgcaaatcaccctggaaacagtcataagaccacactcatttaataatattttatttatcaaaagacactctttctcaggtaagtgaagttctggagaggaaaagaggagtcctgatgtaaattgccctgcaggccttgctgagatcacaaggagattgttactgcagcttgtagcacaatagtaaatttcttctctggatggaagttcaacaatccagatcgtagtatattccttttcattatgctcagtccagcaaatgtgatgataacaaattccttttcatgatcatccattcagcagagaaaatgtttgtaaatgtgttttcatgaagatgtttaccataacatacaggatttaccattatcaatgcatccacaaactctgctgttgttttttatacataattttttccatcgagaagtgatagttgtacatattcatgctgttcatatttcaaccacaaactctgctggtttttttatacgtaattttttccattgagaagtgatacttgtacatatttgtgctgttcatatttcatgtttcatcatccttttacaataaataggttatattgtattttaagtttttctaactgtagtgcagaaattgtactgggtgtatacatagatatcaaaccaaatttacttgttctggctgataatgcatcatttatttcatagattatgtatttctttgacacatttcacgtacaactaattgcataaaaatgaattttcttttagtatagacatcagcatgtgcttaattcggaatttaattgttgagttaaacatcgtcattgccttttccgttgttattaattgctctggtgggaattttgttatctcatacataagacagtgtgccacaatatctcttaaaatttcaatggcaataaactttatatttaaaaacagggaatctatggaaaacacatttttttctaaaggattaaaatatttttttaaaataattttctaaaaagttaggcacggtagcaaacgtctagagtcccagctactcaggaggctgagacaggaggattgcttaagcctacgagttgggggctgcagtgaactgtgattgcaccactacattccagccagggcaatagaagttaaccctttttctaaaaaaaaaaaaaaaagaaagaaagaaagaaaaaaagcaacaacaccaaaacctcaccaacaaaatggtaaagaaaaaaaaaacagcaatacaatgtaagctatttgatccaaagaagtcaatgaaatttaaaacaaatgaaagggaaaaagtaatacttgagtcctgcaggactcagtccaagttctgctgtgcctccctcacggtgagccacccctttagaagtcacttgggtcataagttaacccgataggaagtgtcctggccaatgaactagggaggtggtaaatggcaccattttaaatttaaattcacggccttttcaacggatcagtagccatgttgggtaagagtgcaaatgtcagaggtgaaaagaggcagcaggaccctcccctagtgcttgggcaacagaaggtggaatcactaaggggacaagactttagcatgctcaagtacacaggacagaaaacatgctttttacaaaagctggtaaatatgaagagggaacattttcaagttcctgtaaccaagaactaccgcctgtaaccggtgaaagtgactttctatggcaaaagcgtttttgaaaaggtgaggaagttaaatatcttaatgttgggaggttcttctggtttatctggctagaccctaatggaatcccaagtgtccttatggagcggggagcagagagagagatttgagtccagacgaggaagaaggtgatgtgagtctgggtgcgggacagggggagaatgatgctatgtggggatctgggctggggaatgacttagctgcatgagcggagtgacttagactcctgaactagaagaaatctagggctcatcacctcagcagccctaaccatcaaccttatttttattacaggtcttccatcgacggactccctaaaaagccagcggcgtggaggggcgccctctattggacaaatagatcttgactactttcggccctcaaatagcctgactaggcaaataacaaataataataatttttttttaaatcatggaaaatattttaaaaaacaattaaaaagttataaatctataaaatctgcttctgtctgtgtgtctgtatatttagatgtctcatgtgtacataatgtttcactaccaaaatatatgatgaaaccctcattaatcggcttagaaaactaaacacctaaatattttctcagaaaatacaaaaactttaactcaaatcccttttaattcacctgactttaaaaatctttaaaaaataaagcatgctttaaaattattagtaaagtaaaattagaacatcttcagaatttagacatttggtttaaattatacaggtcaaatactgcccttagtaaatattttcaggtcataaacaactcctgtaatcttttaaataattgaattacatgtctgttttagagctttaagttctagctaaagcctggggacaaatgaagggcaccatgccccctctctgtgctggaaagagacattttctacagctctgacccttgcagtaggctttgcaactgctacctatcaaaattgcctacatcctaagtttattattaaaaggagttgcttggagttaacattataatgaatatatgtaactaaaactatttctcatacaaagtatatgaaaaagtagaatgtatttttaataaaaagttataaaaagacatgaacatgtagtttttataaaaaacagtaattttgtctagttttgcagttctaaaaagttatgttaaattcaaaaataaaaaataacaagacaagactcaaggtttaaataagttgtaaaagatttgtaaaaattagttctataaaaattttacaaaaaaaagcattggttaaaatttaaggaattattttgtttttacagaaattaaacattcattaaaaacactctgatacaaggccttaatttgggttcatgtatcagaatagcagggttttcttagaatattaatctattctttaaaagaactatgaatgttatgcaaactttataaaaatcttaccttagagtcaaactgattaaaattccatagattttacgtaaaattttattaaaaattaacttcaacaaaaataaaatttgattttctcctttaaacaaaagttttgcgtaatattaaataataaagcatttttgtttaccttttaaactataaacacacacacacatacacatacaccaacactaaagtcagctgacctcatactgtctttattggatattcttgtttaaaaaactatcttctttggaaaataaagttttttattttaaaccatattttaaattatcattttgactaaatccataacatacagtgatctgtaataattctattttataatatcaagtgttttgaagaactccaggaacagccatgagagaacactgtggtttagtaacactttatttcctcagtttgaaaatagttgtctttcttggggaggccggtttcagcagatgaaaacaagagtcatgatgaaaattacccagcagtggttagtgtgaccataggaacattgtcatcaggtcagcagaaaacatatcagcaaatttttctcatactggcagtgtgtaggggtggatgtttacagttcctgaagccccagtggtcgtgtggtcttttagttttgccatttataggcaacttgtggtaactagctcaattagacacattccttatcacaaggacagagggctttctgtatcctagggttcttgccttggcattccagaagaatcaggtcacacgtggacgtggagaatgagtgcaaggttttattgagtggaagtagctctcagcagatgggggagccagaaaggagattggtttctccctggattggggccgttcagcagccctggctctcctctgactgccccaggcaaaatccacatcgttctataagtcggtgccctgctggtgtgctggtgcctgttgtcatgttcctcttcatgtccagccgcctgtgtgttcctccgctgatgtgctcctctcgacgtcaagcctcctgtgtgtctgactgctagggtcttggggtttttataagcacaggatgggtcttagcaggccaggatgatcttgggaaagacaacattcggtcaggaaaacaaaaatgcctgttgtcatctaggtccgtggggacaagcccaggtgtggagcttttagccagggaccacagcctcctgtatccaacacttcccttcaccttttctatatcattcaaagggatcatgcccttcccatcccagcacttcactttcatgtcatttgccccctctgaagaggtacatctaactgccattagaatatggatgatgaccagtcttagctgcttcctgctgaaagggggcattgttttgggggaaaacggcagtcagattcctcccaggggtctctataataaaagatcgaggtggctactttcaggaggtcctctaatgtactatctggtcccaagtcccatttctgcaacctcctcctgatgtcaggagctgcctgagtaataattttatcctttaggattatctgtccctcgattgaattaggagatagagaggtgtgatttaccaaggcctctcttagcctctccaggaaggcagtgggattttcatcaaatccctggttaattatggacaacttagtataattgagaggcttggtcttagacctacgtaagccctctattatgcacacctgaaagtgtctcctcttccagtcttccatctcattattgggatcccatttagggtccttcactggtgctacttctcttccagttggataatattcgctcccttccctgatgctataggtgatgcaaagctcatccccaaatctctctgctgctggcagagcagcctgcttctcagtgtctatcaggttctgactcaaaagtaacataacgtctctccaggagagttcaaatgttagggtgaaattctggaaagcttctatatatctatcagggtcatctgaacacttgcccagatctcccttaatttgctttaagtcttgtagggaaaagaggacttggaccttactgggcccaaattcactgggcatctgtaggaggggcaagagtgagactgggcttgtttgggatgaagatttctaggaggggccaggtgagaggctgaagctggatacggaggttggggtggacccagaggagcagggcttgagggagctggcacgtcagctgggggtgcgtctgggactcgtgtctttaattccctgggcttgaccctggcagccttccccgagacagcaaacaggagggctggaacaatcctacatgtcagcaaaggtctggattgctttgcaaggtatagaaagcctgcacatttggggcctcagaccatgtgtcctcacatccagagaaaagttctaattgcaggatggtattgaaatgaatggtcccttcctgaagccaagccagtccttcctgtaaaccataatttggccaaacctatgtgcggagggctatgagatgcttttcctctggattctgagggtcaaaacagtcccaatggttcaggatacactcaaggggagtacaagctgggggtggtgaggagaactggctgcccattctgaaagacagggaatagaggtgttcctcatttcccttccttcttttggcaaaaagctcagggtgtgatggggagggaaagcaagcatcttcacttcactttccacctcttacccctgcgccctggcaaccttggcaggtgccggccacaggtacaaatgcggtatgtacccatgaagcagggagaacctggagattaggaattaactgccctcacctatgtttccttttctccctgctgttgaaaaactttgagttccctgggcctttttatcccatgaggcatggcctccttctgtgggatggggttcagtcagcaggaattggtcctgtccatttacattgtgcctgttgcctggctttgaattcctcagacctgctttctctttctagggcctcagcctgaagcttggaattgagtttgggactgaaaaagcatttcagaggctgtttatatccatttagtgcctcaaataagccctgctgaatttgcaattatcagccagcaggggtcactcctctgttaacttccctattagaaacagagcggtggggattctcacttagaaaagaaaaaaagagaaaaacagttaaagaggcaaaaagtggggaatgctgggggaagaaccccttgcttagtgcaagtgggcccctctaatccttataactttcccatccttcccccagttcagaccaggttgaattccttggccatggaaggaaaggttccattgatgcagtgggtgagaagcactctgtagggtcctggctaccatcggttttctcacacccccctcatcccaggcagtggagggagacacttctgcgacattgctccccctgccccttcatggctattgggtgtggcctttgcctgctgcaggcatgcctaggtgctggagctgggagggaaaagggtaaggagaggtgccctggaagccgctcatgcctggggctgtcaaggtggaggcatacatggcacctctaggaaaaattggtctgatttgcacctttggcggctgagccaaatgctcattttacttagtaacattgcctcagcctgtagcaaaactcttaacattataaaggaagagataagatccatttcaaataatgtgtgagagagaaaagagatgaaaggaaaacagagtcttttacctgcaggaaagggagagaagtggcagagttttggaagaaaggcaggcccaacagtttcccattcactcacactcaccttccgagatcccagacgagccaccagttgaaatgggaaaagtttccttgtccccctcacaggaggtggagtgggggtgtggcttgcttctttagtactccgctgctcaaacctctagggaagcatacagactggcaagttgtggggctacaaccccatggcagcatctaggggtagatgtttacagctgctgaagccccagtggacatgtggtaccatgtgctcttttagttttgccatctataggtggctttgtggtaaccagctcaattagacccattccttaacccaaagacagagggctttctgtatcccgcggttgttacctaggtgtaccagaaaaatcaaatcacacgtggtcttggagaatgagtgcaaggttttattgagtggaagtagctctcagcagatgggggagccaaaagggagaatagttttcccctgaagtcgggttattcagcggcccaggctctcctctggctgccccagccaaactctatgtcaatccattggtcggtggcctgccagagtgctggtgcctgttggtggattcctctcagcgtcgagagtttttccctctcaggaaagggagagaagtggcagccacccatgtgttcttgcactgatgtgctcctctcgacgtccaacctcctgtgtgtctgcctgctagggtcccagagtttttttaggcacaggatagggcatggtgggccagggtgatcttgggaaatgcaacatttggtcaggaaaacaaaaatgcctgtcctcatctaggtccaggggcacaagcccaggtttggagccctagccagggaccccggcctcctctacccatcactttccttcaccttttctgtatcattcaaagggaccatgcccttcccttcccagcacttctcttctgtatcaataggtgatgtttttaaaatttcccaactctagtgcaggcatggtactagacatatacatagaaataaaaccacacttattcttctggctggcaagacatagtatttttgccaaattatgtgttgttttgaagcattttatgtacccctggtcatataaaaataaagctattttgttcagtacaaacagcagcattttctggattagaaagttaatcatcttaaaagatcatcacggatttttccattgcactcatcactaattgctttggcaaaaaatttcttatctcacgcatgacaaaatcagccgcagtatctcctagtaatttaatggtgatgatctttataaaggaaataagcacatcaagggaaaacataattttttttaaaaaaagagtaataaaactttttaaaagtcttttttaaaagactgcttttctaaaatagtaaaataaaactccaccaataaaaccaccaacaaaacagaaaagaaaaaataatgatatgatcggagctatttgatgaaagatggtaaattaaatttaaaatgattagaagagaaaaagcaatacctgtctcccgtaggtctcagtccaggttctgctatgcctttctcctggtgagccacctatttaagagtcgcttaaagcatatgttaatccaacaacagcagattaaaaaccaatgcaatctgaactatttgatctaaaaacataaataaaatttaaaacaaataaaagagaaaaagcagtacctgtgtcctgtaggtctcagtccaagatctgctctgactcccttgtggtgagttagccctttagaagtcacttggggtggggcatatgttaattccactaacattggttctggccaatgagtcaggaaggtggtaaatggcaccttttcttcttgctgatttctttcagttcctttggagtctggacattagtcctttgtcagatgcctagtttgtgactactgtttcctatactgtgggttgtgtgtttaccctgctgatatttcttctgccttgcagaagattttcggtttcattaggtcctattgatcttattctatttttatatttttgcgtttgcttttggggcattagtcatgactacttggcctaagccaatgtctagaaaagctttttggatgctatcttgtagcatttttagactttcaggtcttagatggaagtttttatatgctttgttaaagatcaggtgactgaaagtaccgggctttgtttctcggttctctattctgttccattgctctatgtgcctatttttatacttcctgcaccatttattgaataaagtgtcctttccccaattagtgtttttgcatactttgttgaagattagttgtctgtaagcatttggctttatttctgggttctctattctgttccattgctctatgtgcctatttttatacttcctgcaccatttattgaataaagtatcctttccccaattaatgtttttgtgtactttgttgaagattagttgtctgtaagcatttggctttatttctgggttctctattctgttctattgctctatgtgcatattttataccagtatcatgctattttggtgattgtagccttgtagtataatttaaagcctgccttcagatttgttctttttgcaaagtattgctttggatatgcggtcacgtttttggttttgtataaattttaggattcttttttctagttctgggaaggagaatgatgatattttgatgagaattctactgctctgtagatggctttggagagtatggtcactttcacaatattgattctacctattcataagcttataatgtgttcccatttgtttgtgtcaactgtgatttctttcagcactattttgtagttttccttgtaggaaacttacattaacctacttggttaagtatatttctaagtattttacttattaaaaattctcagggaaatgcaaagtaaaactgaggtgggaaattaaagaaaaataaaattaaaaagaaagggaaataagctttcttgtattaagctaacttgtcccagaggcagcaacaggcacagcccagacccaggaaaagtcttgataatattatttattgtattctggagactcttccagcactccttcaatgtagggagaagaaaaacaaattttcctttgttttatggtatgagtttatagattcttgttctctttaactagtaacttcaagtattctgttttatctaagaagtatggcaaaggtcatgagaagcctgagcaggcctgaactacagctctctaggcaccatagtgaagataaaccaatgcaagcctctttagagcaaaacctagataatagacatctgggttgcatagcaacagttatgtgcaatcctgagttatgaacctgttacaatttgattaactgtctttttcctgcctctgtatccctgctttcacaccactgtaagcttgcttcaagctggcccacccccttttgtgaagtgtgtataaaagtcaagtgctgtctttgttccaggccctgtctttggacgtgagtctgctgggcctgagagcactcaataaaagattctcctgttttaacccaaagcctctctctcatcctcctaaatcccacaacaaaaccacaatgagatgctatcttaatcttgctagaagcccataatttaaaagtcagaaaacaatagatgttggcatagatgtggtcaaaagggagcactttgacactgctagtgggaatttaaactagtccgaccactatggtaaacagtatggggattccttaaagaactaaaagtagaccattcattccagcaatcccattactggctatctacccaaaggaaaagaagttattccataaaaaagacacaagaatatggatgtttatagcagccgattcgcaattgcagtgatatgggaccaacttaagtgcccatcaacgaacgagtggataaagcaaatgtggtacaccatggaataatacttgataataaaaaggaacaaaataatgtcctttgcaacaagttggatggaactggaagccattattctaagtgaagtaactgaggaatggcaaatcaaatattgaatgttttcacttttaaatgagagttaagctatgagaatgcaaaggcataagaatgatataatggacttggggactcagggggaaaggttgggagggggatgaggaataaatgatgacatattgggtatattatacactgctcaggagacagatgcctcaaaatctcagaaattaccactaaggaacttttatccacataaccaaaaaccacatatattccacacactattgaaagaaacataaacattattttaaaaaataaagccacttttaaaattagcaaaataaaataaatatgtcttcagagtttagatattggatccaaattagacagatcaaatactgcctttactaaatattttcatgtcattaacaacttctaaaacctttcaaacagttttttgacatgtcttggaaccatccatttctagctaaggcctgggcacctgtgaaatagggccatgcccccccttatactgggaagagtaagatatttcaagactaagatgttttctacagctccatctttttctttaagctctacatcaaggacataattaaaattggttgtctcctaagtggtttactaaaaatgcatacttaagagttaccattataattaatatttgtatctaaagctacttaaaaattttcacacacaaatctgactgaacaagtaaaatatattttaagtcaaagtttataaaaggacatgagaacatagcttttatgaaaaaattagttttgtcaagtttagaggttttcaaatattttaaattcaggaaataaaataacaaaaagacaaaagaaaatggttgaacaacttagaaaaggtttgttaaaattcatcttataaaacaatctacatgtaaaaagtgggctaaaatttgaaagagattatttaggttttccataaattaatccagaaggggtaggaagtcttaagaatgaggaaggacaggaggaaggggaggtcatcctgacactgcagaggcagaagtgcagctgaaggtatgaaggctaagaggggaggggagtttgagtgctgctgcctggctgtcagagcagaggagggtcctgggcaccagacttgaggaagggatgaaaatgctgggcagacctgtagtgggcccttgagatggcagatagtggtttccagagagagggccattgttttccagtgcccagcactgagcagagagagttttgggcagtgtaaaaaaaaaaagagaacttacctctttctcgttttagaaaaagaacagtctaagaatatcagcagggaaactctcagtgcttcaaggggttaaacgcccttttggctttcttgtgttggtttcatcatagaggaggagaaacttcttggaagtgttcctaaaaacacaacacgtctgcttctcctttcaaaaaaggaagtgctaaaacacgaacactctagatccaaatattaatacggatgtctaaatgcttccgttttccaaggggcagaaagctaaaggttgtaacctattcatttcagtcaaagttggtgaaagggaagcaaaggaactgggtggggcttggaaggatgacgaagctcaagctcattggccagcaacctctctcctgggggcgggaggggtgagcatacgtcattgctttggcttctataaaatgaggaggactcaccgagtgtgaagagtccttctggtgattgcagctgagagcacactcacgacgttctgcaaggattctctgattatgattctgaagggaaaagcgatggaatggacagcagagattgtaattttctttatcttgaattacggaagaaagtatctaggacagaaatccacgacaagtccttggaaccagcagatctcttcgttcacggagacgttgacgtattctctattgaagaagattcttaccttcttactggacaaggttttgtcagttctgcgtgactggattgtccgggagactctgaggaaactgatgtcacatgtttttccaaagaagatgtttctggaaccaacaactgtgattgtggtttgaggacttctgagagttccagtacaggaaataagcagaacatcagctggaggctaaacggatccagacttcactcttcacttcccttcctattcagtctattgtgcctgctgactgagaagcttggctggtatgtgagcaaataaacggaactattcagaaggagatgttgacatattctgtattgaagaagatccttatcttctcacctgacaaggttttgtcagttctgtgtgactggattgtccggaagactctgaggaaactgatgtcacatgtttttccaaagaagatgtttctggaaccaacaactgtgattgtggtttgaggacgcctgggagttccggtatgcgaaataagcagaacatcagctggcggctgaagggatgcagcctccactcttcacttcccttgccattccatctattgtgtctgcctgactgagaagcttggctggtatgtgaggaaataaacggaattataaacaaggagattgtttctcatctacttcattctgttgtggcttttctattttggggttcagggtgtgtgacaaggaccaaggagatgaaaggtttcatgatggagaaagcccaggcaatcagattgaagagctatccacagggaatcttggctgctgaggggctgcaccctgcaacggactgaccatatgacagaaaagggttttaaaggctcaacttctggactgagaacccagagtaatttgggaacctcctctgtgaggagatatgaaagctgggaatcatgacatccctaggaatggaaggcacatttcctgatggaaggggtgctttggaaaacaggagcagagtagacacagcagccttgtggatacgggtgggcagcatgcatgggtgatgtgaacgtggagtgtttgtgatcgaaactcaaaatgtctgacaaagtgaaaacctagaaaccacaatgaggaggaagagtttgtgagggcaatcactctccccatgtgtgaaaatcgggggctcttaaaatctcatctggagaggtgcagtctaccaaactctgggactttagcctccccttttaaaaaaccgtgcatcaataccaacgtccgaaaccacagaaataacacctggcttgcatggagacaaggacaaaaagccgtcatgatgagttgttctgctcacttgctgcctctgttcagtgcacaggatattgtccacccactagcaggctactgcaagagaagtgtgcaatatgttccctatgtgccatatatgtgccatatggcccatatgacaactgagtcagaaaatatctgatgccctcagagttacactccacctggagcttgcccccagccatccaggacctaggctccctaccctgtccaattttctggtgttttgggggcttcattctctaaggtgtgcccactctttactcaaaccaaaacacccacatattcctgcccatgaacaaccaatcaaccacttctcagttccacatcctgctgttgggtctctagtggtgacactgtaactcccaggtcatagtggtgacactataacacctagctaaattgatgccttgtctctaggaggccatgggctcctgcaggtctcatctgactctctgtagccttccctgacaatgctcacaatacccaagccagagccacattgacagcaagctgctctcatcttacctttgccagacctggccactggaaaaggctgaccctcatcctgcaatgcctatacctccaacctttgtctcaagctggtgtcctggagggacttctaagcagaaaacagattcagactcccatcctctcctgaatggcctcatatccaattctcagaccctcagccttcattgtaaggacacttcatccatgcccttgagtattctgtctgcactgtgtattctgcaatagattctcctccctctgcgaccctcaactccttccgcagactttttgttttcttgatcatctaccatagtcttccactgggacactgccaagcccattctggagagtgagttgtgcaagtacactgccccccatctacctttcgggaggtgtatacacccttctttctcccaggtctggaggctttctattttcatcctgaggcatctccacctgctcttggattcttcaaattgacaaccaccagttaacaagaactatgtgtcaccaaatagccaaacaatggcaattacaaaaataaaattaatagctgtaacccccattagcaaggatacacaaatcaaatcagggatagtgggtgaggaagtctgcctaacattcaaggaaggattctgaagtgatacaaaatcattgcctttgctatctttagaatggacactttcagccaggcacagttgctcagcctgtaatcccagcactctgagagccccagttgggtggatcacttgaggccagcagcttgagaccaccctgggcaatgtgcagaaaccccaactctactaaaaatacaaaaatagccagttattgtggcacatgcctgtaatcccaactccttgggaggctgaggcacaagaatcacttgaatctgggagccagagtttgtaatgagcgaagatcatgccactgcactctagcctaggcattagagtgataatctgtctgtggaaaataaaaacattcctcttcaaagttttcttctttaaatcataaatgttggaattaatatatcctctttgaaactcactttcttcaagcttctttatttgatggtagtaaatctttgttaagctttatgaggcaagagtaatggaagaagcatattatatatatttatactctaacctcagtgcttgttctagcaagctcaggcatgcgtgaatgtgcccaggcatgttccagcccataccttatatcctttccttattgggaaatgctgttactcctataagcattcttgtaagcaacttcctctttttctttgtctccactatctttacctattgaggacagttttaggttcttagccagttggatgtagcatagactgtgaggtccaaccccagccaatggagatagcacacagcagtagcgacctcatgcttaacagataaatattcctgtctccctttgtttggggtgctctcagctgatgagcaacaccctttctaaagaaattaaagttgtcttgctgagaaaacttttggtctaaatgctgattcttccttgcagcactgaagaagaagcaattatttccaacactttctcatacacaaaaaaagaagaaggtggaagaaaactttcttgtgcaccctatccctcactcagaaagacaacagaaggctcctagtggcaagccctagaggattcatttcttttgggaaccctcttggctgggatactaggactcaggtcaaactcagcattttcagtgtgtgggaagtgtgcttgggtttcactgttacttccaataatgtgatttggtccttggggttcaccaaattttggtatggagtggtgaaccctgttaagtttaagtgtctataaaattaacaaagcaaaataaccattctgccccatggttcagagaccaaatattgtgtaggaaatgctttagcgagagaaacagagaagaataaaaaatgtcctcaagcgctgcattatttcttgttatcgtccagatcttagaggaaaggctttcattttccctcattcagtatgatattagctgtgcatctgtcatttatggcttttattatgttggggtatgttccctgtgtatgtagttttttcagggtttttgttatgaagtgatgttgaactttatcaaacgtttttcagtttcagttgaaacgatcatatgctttttgtccttcattctcttgatatgatgcatcatgttgatgatttccatatggtgcactgtccttgcatcctgggcatgaattccacttgatcatgacaaatgaatttttaatgcattcttgaattccgtttgctggtattttgttgaggatttttgcatcaatattcatcagagatattggcctgcagtttctttttttttcttttttctttgttttgttgtttgtttgtttgtttgttttgatgtgtctatgtctggttttggtatctgggtagtagtgttccatccccttttattttttagaataatttgaataagactggtgttggttctttaaatatttggtagaattccgaagtgaagtcattgggccccgggcttttctttagtggaaggctgtttattatggcttcaatctcgttacttattattggtctattcatgttttgaatttgttccttatttaatcttggtaggctgtgtgtatctaggaatttgtccatttcttttagattttcaaatttattggcacataattgcccattgtagcctctaatcgtcatttgagttcctgcagtaccaattataatgtctccttcttcatttttgattgtatttatttggatcctgcccctttttttcttacttaggctgcctaataatttcttaattttgttgaactttttcttttgtttgtctcgctctgccaccaggctggagtgtagtggtgtgatcttggctcactggaacctccgtctcccaggttcaagcaattctcctgcctcaccctcccaaatagctgggactacaggcaagtgccaccactcccagctaatttttgtatttttagtagacacgggttttcaccatgttggccaggatggtctcgatctcttgacttcataatccacctgcctcagcctcccaaagtgctgggattacaggcatgagccactgcgcccagcctaattttgtttaaattttcaagaaatcaacttcttctttcattgatttctgtattttttatttccattttatttatttaaactctaagctttattctatcttcttctcattttagctttggtatgcttattgcctctctagctctttaatgtgcattgttagattgtttatttgaagttcttcctctctacaccataagacgtaagcatgtcctcattatgtcataagatgtaaccacttacagctataaacttccttcttagttctgcttttgctgtatctcataggctttgttatgttgtgtttccattatcaattgtgtcagaaatttttcaatatttttcttaatttcttcattgagcaactgatcatttgggagcatatttttaaacttccatgtacttacatagtttccaaaatacctcttgtgatcaatttctagttttattccactatggttcaagaagatgcttgatattatttcaattttttttcacattttaagatgtgttttgtgacctaacatatggtctactttttttttttattaaactttaagttgtggggtacatgtgtagaccgtgcagttttgttacataggtatacacgtgccatggtggtttgctgctcccattaacctgtcatctacattaggtacttctcataatgctatccctcccctaacctccaccctctgacaggacctggtgtgtgatgttcccctccctgtgtccatgtgatctatttttgagaatgatccatgtggattagaatgctgtggaaaagactttggattcctaatatccagggagggagacgatgatattactttcaatatcacacgggtgtacacactctctgtgacattgttcctaatatccagtggaagagaggatgatataacacccagggagggagaggatgatattactcttaatattgcagggtgtgtacccatgcctatgatattgttcctaatatcaggagggggagaggatgatattactcagaatatggcagggggtgtacacacactctgtgacatggttcttaatatacaggggagaatgggacaatattactctcaatatcgcagggggcgtacaaccctgtgatttgttcctaatatacaaaaggggacagtatgatattgttcctaaaatcgcagaaggtgtacaacgccctgtgatattgttcctaatatccagggcgggagaggatgatattacccccaatatcacagggggtgtgcactttccctgttacattgttcctatgatccgagtggggggaaatgacattagtcccaatatcgcaggatgtgtacactactcccccatgatattgttcctaatatcaagggggagagaggaggatattactcccaatatcgcaagggaggtacatcctccatgcaatattgttcgtaatattcaggaggagagaggaagatattactctcaatatcgcagaaagtggacacccaccctgtgatgttcttcataatatccagggaagcagacgattatatgactttcaatatcgctgggagtgtacatcccttttgggatattgtttctaatatccaggaagggagaggattatattacttccagtattgcagccagtgtacacatttcttgtgatattgttcctaatatccagaaagggaaaggatgatattactcccaatattgcaggtggtgtacacccccctctgatattgttccttacatcaaggaaaagaaagaagaatattactcccaatatcgaagagagtgtacacccctcctgtgatattgtatttaatatccatggggaaagaggatgttgttactcccaatatcgcagggggtttacacccacactgtgatattgttcctaaaatccagtgaaggagaaaataatattgctcccaatattgcagggtgtatacaggccctcccccgttatattgctcctaatatccagcggtggagaggatattactttcaatttttgcagggagtgtgtaccccctctctgatatttttctaatatcaaggatgggaaaggatgccattactcccaatatcgcaggaggtgtacatgccctgtgatattgttcctaatatccagggaggtagaggatgatattactttcaatattgcaggggctgtacaccctctatgatgttgttattaatatttaggttgggagaaaatgatatttttcctaatatcctgggaaggaaaggatgatattactgtaaatattccagggagtgtacaccttcctaatattctaatattgttcctaatatccaggggtgggagaggattatattactcccaatatcgcagtgggtgtacacccctcctgtgatgttgtttctaatatccaagcgaggagaaaatgatatcactctcaataccgcagggggtgtacaccttccccatcatatcgttcctaatattcagagggaaagaagatgatgttactttcaatatcgcaggggttgtacacaacccctgtgatatttctcctaatatccaggaagaaagaggatgatattgctcccattatagcagacggtatacgcctccctgtaacattgtttctaatatcaagactgggagaggatgatatcacttccagtatcgcaaggggtgtacacctcccccgtgatattgttactaatatccagggggaagaggataatattactttcaatattgcaggggctgtacacccccgtgatattgttgttaatatttaggttgggagaaaatgatattagtccaaatatcgcagagagtgtacacacttccgataatattgttcttaatatccatgggggagacgatgatattacacccaatatcgcagggggtgtagtctccccttgtgatattgtccctaatattcagggaagtaaacgatgatgttagtgtgaatattccagggagtgtacaccccctttgtgatattgtcctaatatccgcaggagagaagataatattactcccaatatcgcagggggtgaacacaccccctgtgatattgtttctaatatccaagcgaggagaaaataatattactcccaatgtctcaggggatatacaccttccctatgatattgtttctaatattcaggtggaaaacgggtgatattactcctaatatccaggaagaaaggggattatgttactccccttatagcagggggtatacacctcccctgtaatattgttcctaatatcaaggctgggatatacgtggggggaaggatgatattactcccaatatcacaggggttataaaaccttctgtgatattgctcctaataaccatggcggaagaagatgatattactcctaatattgcaggaggtgtacactcccccattatgttgttcctagtatgcagaaaaggagaggatgacattattgccaatatcgcagggtgtgtacaccacccatgatattgttcctaatatttagagggacagaggatgatattactcccaatatcgcagggggtgtacacgcatcccctgtgatattgttcttgaaatcgaggggaaagagaattatatttctctaaatattgcagagggtgtacaccgccccctgtgatattgttcctaatagccgggggcggggggagataattaaattactttcaatatctcagagagtgtacatcccccttgtgacattgttcctaatatccagagcaaaagagaatgatattcctcccagtatcgcaggaagtgtacatttaacctgtaatattgtttctaatatccagggggaagagaatagtaatactcccaatatcgtaggggttgtacaccttttctgtgatattgttgcaaatatttagaagagagagagaatattactcgcaatatcacagggaatgtatacttcccctgtgatattgttctaatatctagaaaaagagaggataatattactcctaatattgcagggggtgtacacccccacttgtgatattgttcctaatataaaggaaggtcgaaaaacaaacggggagcccagggggaaggaaggcaggcgaggaagaggcagcgccggggcgccggagggagcagccgggccgcggaagcgcgagcacgagaccggtcgcggtcgcagtcgcatttttgccgttgtcgcggccgccgccgccgaggcttacccggggatgtctgagcccgcgcctcgcggcccccaagctccacgctgcgcccgctgtcccggcctctaagggccgccacgtccctgcggcgcgcgcaggcagaaagcggcttcgtgccggcggagggggcccgggcgggccgggaaaggctgccccaggccccgcgcctaccccatcaccgcggccggcgccgggccgggaggatgagcggtgtggggctctgaagcatggagggggttttgtacaagtggaccaactatctcacaggttggcagcctcgttggtttgttttagataatggaatcttatcctattatgattcacaagatgatgtttgcaaagggagcaaaggaagcataaagatggcagtttgtgaaattaaaggtgacagctttggaggggaccacccttgattggatacataaattctgttcattcagcagacaacacaagaatggaattaatcattcctggagagcagcatttctacatgaaggcagtgaacgcagctgaaagacagaggtggctggtcgctctggggagctccaaagcatgtttgactgatacaaggactaaaaacgaaaaagaaagaagtgaaaccagtgaatcgctgaaaaccaaaatgtctgaacttcgcctctactgtgacctcttaatgcagcaagttcatacgatacaggaatttgttcaccacgatgagaatcattcatctcctagtgcagagaacatcaatgaagcctcttctctgcttagtgccacgtgtaacacgttcatcacaacgcttgaggaatgtgtgaagatagccaatgccaggtttaaacctgagatgtttcaacggcaccatccggatcccttagtttctcctgtgtcaccttctcctgttcaaatgaggaagcgttctgtcagccaccctggttcttgcaccagggaggagtagccactgtataaaagaaccagtatctgcacttcaccgactctcccagcgacgccgaagaacctactcagatacagattcttgtagtgatattcctcttgaagacccagatagacctgttcactgttcaaaaaatacacttaatggagatttggcatcagcaaccattcctgaagaaagcagacttatggccaaaaaacaatctgaatcagaagatactcttccatccttctcttcctgaagaaactgtagtgtccaactttctctaagtattgctatgcaaaagctgctgtaattgaactattgttatagggagtagttttttcccttaggactctgcactttatagaatattgtaaaacagacaaacaagaaaacaaaccacatacttttgaagcgtgttttatctttatatagtttgtttgcaagagtattttcctaataacttcacagtatgaatgtgcatcttttttttctttttttaacaaatgatggtgtaacattttgacatccataaggacaaatgtagatatttttctaaaaaaccgtgaggggactgacagcttggtcagggtgtattgtagcttataaacatgaaatcttacaaggtttcagtttgacagaagtgtgatatatgtaacttgtgccatggaccaaatggtcactttaccacagctaaaaatgagttatgatagcagcttgatggtgattgcattgtattcctttaatcaaaaaggaaacgcaatattctaagtatctttagcccaaataccatgacatattgagcatctttaaataaccagactgtattgtccttcatatgtgaagttgacactactgatttgtcaataccaaattttgggttaaagtgtttaatttttatttatttattttcttgttgcctcaaaagatgattgcattctaacttttgtgacctaccaaatttaagatgtgtatacattgttctttacgttgttctagaaaagagattttaatgctgtagtgacttagctcacttacatcagagaaataaacaactttcaatggaaaaaaatatatataaaggaaggaagaggatgatattacttctcatatagaaggggttgtacaccccccttgtgatattgttcctaatattcagggagggagaggattatattactcccaatatagcagggagtgtacacccccccccccgtgataatgttcctaatattcagggaagcagaggatgatattactttcaatatcacagggggtgtgctgtccccctgttatattgttcttaatattcaggggggagaggatattattatgcccgatatcacaggagaagtacaccccacaagtgatattgttcctaatatccaggggtaaagaggatgatatcgcaggtggtgtacacccctccccgtgatattgtttctaatataaagaaggagagagcatgatattactcccaatatcgctggaggtctacaccccccttgtgatactgttcctaatatccaggaagggaaacaatgatattgctgtgaatattccagggggtgtacacccctttgtaatattgttcctcatatccagggggtagagaggatgatattactcccaatatcgcagggggtgcacggccccactgtgatattgtttttcatatccaggaggggagaggatgacattactctcaatatggcagggggcgaacaccccctgtgatattgtgctagttaggttgggagaaaatgatattactcccaatatcgcagggggtgtacaccgctcctgtgatattgttcctaatatccatgacgggagaggatattactcccaatatcgcagggggtgtacctctcccctgtgggattgttcacagtatccaaaagggaagaggatgatgttactcccaatatcacagggagtgtacaccaccattgtgatattgttcctaatagccagggaagaaaacgatgatattattgtgaatattacagggggtgtacacaccccctgtgatatggtttttaatatacaggttggaaaaggatgatattactcccaatatcacaaaaggtgtacacacccccccatgatattgttcttaatacttcggtggggagaaaatgatattagtctccatatcacaggggtgtgaactcctccggtgatattgtttttaatatcaagaggggaggagatgatattgctttcaatatcgctgggggtgtacatccctcctgtgatattgttccttatatccaggcgaggggaaaataatattactcccaatagtacacaccccatgtggtattgttcctaatactcagggggaaagaagataatattactttcaatatcacagggtttgtacacctttcctgtggtatagttttcaatatccagggggaaggtacatgatattactcccattgcagcaaggggtgtacacacctcctgtgatattgttcctaatatccagaagtggtgaggatgatattactcccagggggtgtacaccccacctatgatattgtttctaatatccaggggaaaagagtgtgatattatgcccaatatcgcagagggtgtacacttatcctgggatattgtttctagtatttggggagggaggagaggatgctattattctcaatatcgcagaaattgtacacccccgctgtgatattcttcataataatcagggaaaaagaggatgatattactaccaatattgcagggggttacacttcccctttggtagtgttcctaatatccaggaagaaagaggatgatattaatcccattttccaggaagtgtacacccaccgtgtcatgttgttcctaatatccagcagggaagaggatgatattactcccaatatcggagagggtgtacacttcccctgttatattgtttctaatacccagggggaagaaggatgacattactgccaatatcacagggtgtgtaccccaccctgctattgttcctaatattcaaaaggaaagatgaaaatattactcccaatatctcagggtgtgtacacctctcctgtgatatcgttcctaatatccacaggaagagagaatattactctcaatattgcaggggggtgtacacccccctgtgatattgttccaaatattcgggcggggagaggatgatattagtcccaatatcgcagggggtgtgcaccaacctgtgatattgttcctaatatccatgcgggggaggacgatatcactctcaatgtcgcaggaagtgtacacctctcttgttatatttttcttaatatccaggagggaaaagatgatattactgccaatatcgcagggtgtgtccaccccccttttatattgttcctaatatccaatggaaaagaggatgacattgctctccatatcccagaaggtgtacaacgcccctgtaatattgttcctaatattttgggggaagagaggatgatataacttataatatcacaggaggtgtacaccacccctatgtattgttcctaatatcctttaagggagaggatgatattactcccaatatctcaggtggtgcctattccccctgtgatattgtttttaatatccaggggaagagagtatgatattacgcccaatatcgcagggggcatacaccctctctgagatattgttcataatatatagagggagagaggatgatattacttccaatatcagaggtggggtacaccccccggttatattattcttgatatccaggaggggagaggttgatattactggatatatagcagggagtgttcacatcttctgtgatactgttcctaatatccagaaaagtagaggatgatattactcccaatatcgcagaacgtgtacacctccctgtgatattgatcctaacattcaaaggggagaggatgatattactcaaaacatcacagggcatgtacactcccctgtgatattgttcctagtatccagaagggagcaagataatattactttcaatatcgcagggggtgtacacccctctttggtatgtttcctaatatccagaaggaaagagggtgctattactttccatattgcaaggggtgtacacccccctgtggtatggttcataatatccagggagggaaagggtgctattattccccatatcgcgaggcatgtacaccctgctgcggtacggttcctaatatccagggggaaagaggatgctattacttcccatatcgcggggtgtgtacacccccgtgtggtatgttttgtaatctccgggaacgaagagggtgttattacccctcatatcgctggaaatgtacactcccctgtggtacggttcacaatatccaggggattgagggtgctattactccccatatcgcggggggagtgcacctccctgtggtatggttcgaaatatccagggtaagagagggtgctattattccccattttgcaggaggcgtacacccctctatggtatgttttgtaatatcccaggtaaggggtgctattgagagaagagagcaaaagaccccccccatattgttctgtattattttatactcagtacctgttttaagaagaaacaaggaagcgaaaccaaaggcaggcagcccggcgccaggcaccagatccaaaaccagacccgaaaccaggcctgggccttcctgaccttagcctgaaagttaaaattcaacccatgacctagcaactgatgttatccatagattccagacattgtatggaaggacattgtgaaatttcttgttctgttctgtttcactctgagtactggtgcatgcagcccttgtcacatacccactagattgctcaatcaatcatggccctttcatgtaaaaaccttagtgttgtgagcccttaaaaaggacagaaattgtgcactcaacaagcttggattttgatactctagtctgctgatgcttccagctgattaaaagccacttccttcactacctcggtgtctgtgggattttgtccgcggctcctcctgctacactgtgactccccttatagagaggggtgtacacccccctttggttcctaatatccagcgggggagtaggtgctattactccccatattgcggggagtgtacacccccttgtagtacggatcgtaaaatcaaggagggagagaaggtgtaattatccccatatcacagggagtgtacacccctttgtggtatagtttgtaatatccacgacgggagagaatgctattactccccatatcgtggagggtgtacaccgccctgtagtatggttcgtaatatccggaaggggagaggttgctattactccccatatggtgggaagtgtacacccccatgtgatatggttcataatatccaggggggtagaggatgatattacccacaatatcatagaaggtgcacacccttttgtgatattgtccataaaatccagaaggggagaggatgatattacttccaatatcacagggggtgtgtagccccatatgatattgtttgtaatatcaaggtagggagaggatgctattccttacaatagctcaaggggtgtaaccttcttgtgatattgtttgtaatatccagaaggggagaagataatttttttattttaaaagtaaactttaatgtcaaaaatgcaaacttgagaagggcagaaagatcaaacagaaggctgccacttcacaattggagggttgcacagtggccgggcagaggcgctcctcactccccagacggtgaggcagccgggcagaggtgctcctcacttccgagatgttgcaggagccgggcagaggtgctcctcacttcccagaacagggggctgccgggcagaggtgctcctcactgcccagacggtttgcaggcctggcagaggcactcctcacttcccaaacggagcagcggcaagccagaggcgctccacacttcccagatggtggggcagccgggcagaggcgatcctcacttctcagagggtagggcggcccagcagaggcgctcctcacttcccacatggtggggcggcaggctagaggcgatcctcacttcccagacggtggtgtggccatgcagaggtgctcctcacttcccagatggtgtggccgccgagctgaggcactcctcacttccctgacagtggggcggctgggcagaggcgctcctcacttcccagacacttggactccgggcagagactctcctcatttcccagatggtggggctgccgggcagaggcgctcctcacttcccagacggttcagaggccgggcagaggcgctctggggagaggataatgttactcccaatatcgcagggggtgcacactccctgtgatattgttccgaatatccagagggggaaaggatgatatagctcccaaaatcgtggggagtgtacacccccctgtgatcttgtttgtaataccaagaagaaaagagaatgctattatttccaatatagcagggggagtacaaccccctgtgatattgttcgtaatatctagggggagagaaaattatattagtcttaatatctcaggggacgttcatccccctgtaatattgttggtaatattcagaatggagaagatgatattgttcttaaaatacaggaaaaaatatgataatattacttccaatatcgaagggggtgtacactctcctgtgatattgttcccaatatccagaatgaaagaggatgctattactcccaatatcccagggagtgtacacccctttgccatattgttcataatatccaggggaagacaggataacattactcccaatatcaccgggggtgtccacccactagtgatatttattgttcatcatatccagaaaaggagaggatgatattactcccaatattgcaggtggtgtacggtccctgtgatattctttgaaatatctagaaaaggagaggatgatatcactccgagtatcacagggggtgtacacccccctgtgatattgttcgtaatatccaggggagaaaaggatgatataattgccaatatttcaggggatgtgcacctccctgtgatattgtttgtaatatccaggggtggagaggatgatattactcaaaataacgtaaacatcctgtgtgtacatcccctgtgatattgtttataatatccaggggggtagaagatgacattacccccaatatcacagagtgtacacacccctgggatactgttcataatatccaggcgggaaagaatgaactacttccaatatcgcaggatatgtacacccccctgtgatatatttcctaatatttatgtgggtaaggatattacccccaatatcacagaaggtgtacatcctctttgtgatattattcctaacatccaggaaaggagagaatgatattactcccagtatcgcagggggtgtacaccacccctgtgatattgttgctaatatccagggggagaggataatattactcccaaaatcacaggggacgtacactcctcctgagatattgttcctaatattcatggggaaaagaatgctactactccaaatacagcagagggtgtacaccatccccgtgatattgttttttatatccaaagggtgaaaggctgatattactcccaatatcgcagggggtgtacaggccccccatgatatcattcttaatatccagggaggcaaagaatgatgttactcccaatattgcaggctgtatacaccccccgtgatattgttcctaatatccagagtaagagaggatgacattgctcccaatattgcaggggttgcacgcacgccctgtgataatattactcccaatatcaacagtgggtgtacactcctcctgtgatattgtttgttatatctaagaaagaagaggatgatattactgtcaatatcacagaaggtgtacagccccttgtgatgttgtttctaatatccagcggtgagaggatggtattactcgcaatattgtagggggtgtccaacggccctgtgatattgtttctcatattcaaaaaggaaaagaataatataactccaaatatcgcagggtgtgtacacttccctgtgatattgatcctaatatccaggaagagagaggatgatattaatcccaatatcacagggggtgtacatcgcttctgtgatattcttcctaatatccagggggggaggggatgctattactcttaaaatcgcagggaacttacactcccactatgatatttttcctaatatccaggaagggagaaaatgatattactcctaatatcacatatcacaatgggtgtacatctccccgtgatattgtttctaatatcaaggatgggagaaaattatattactctcaatatcgcagggggtgtgcacacctcctgtgatattgttcctagtatccagcggaggagatgatattactttaaatattgtagaaggtgtacaacccccctttgatattgttcctaatatccagggggaaaggagatgatattactcctaatatcgcaggggctgtacaaccctatgtgatattgtttcttctaatatccaggggtggagaagataatattactcctaaaatcgaaggggacatacactccccctgtgatatttttcctaatatccagaaggaaagaggatgatattactcctaatattacaagaaatgtatacctgtcctgtgatattgttcctaatatccagaggggtaaatgattatattactcccaatatcgcaggggtgtacaccttccctgagatattgtttctaatatgcagtggaggagaggatggtattactcccaacatcacaggagatgtaaactccccttgtgatattcttcctaatgttcaggacgaaggagggtaatattactcactgtattgcagcagggggtgtagagccccctgtgatattgtttttaatattcaaggttggagaaaataatattccttccaatatcgcatggggtgtacacccttctttttatatagtttctaatatctggggggagaggatgatattactcccaatatcgcagggggattacacccccactgtgatattgtttttaatatccagggtgggagaggataatattactccaaatatcccagggctatacaccctccgtgtgatattgtttctaatatccagaggaagagaagatgatattactcccaatgtcacagggtgtgtacaggccttctttgatattgttcttaatatccatgagggagaggatgatattactcccaatatcgcaaagactgtacaccctttctgtgatattgcttccaatatccagggagggagaggatattacactcaggatcacagggggtgtacaccccaacctgtgatattgtttctaatatctagggaaaatgagggtgatattactatcaatatcacaggaggtgtacactcccttatgatattgttcctaatatccaggagaatgacaggataatattactcccaatatcgcgggtggtgtctccccccactccgtgatattgttcctaatacccagagggggagagaatcatattactcccaatatcgcaggggatgtacacctacatccggcggagtagaagataatattactcacaatatcgcaagaagtgttcaccttccctgttatattgttgctaatatccagggagtgagaagatgatattactttcaatactgagcgtgtacactacccctgtgatattgtttctcatatccagtagaggagaaaatcatgttactcccaatattgcaggggtgaacacctcctttgtgatatttttcctaatatcaggaaagggagagtatgatattacccttaatattgacaggggtgtacacccccctttgatattgttccaatatccaggggggcagaggataatattattcccaatatcgcagagggtgtacaccccccgtgatattgttcctaatatccagagaaataaaaaatagtattatttccaatatcacagggcgtacattttccctgtaattttgttcctaatatctggggggtggggtggcaggataatattactctcaatattggagagggtgtacacccccctgtgatattgttcctaatattcagggtgggagagaatgatgttactcccaatatctcaggagtcgtatacacccccttgtgatattttttctaatatccaggaggcagaggatgatattgctcccaatatcgcagggggtatacacccgagctgtgatattgtttctaatatgcaatatgggggaaggatgattttactttcaatatcgcagggaatgtacactttccttgtgattttgttcctaatatccaggggtggagaagatgctattactatattactcctcatatcgcaggcggtgtacaactccctgtgatatggttcagaatatccagagtgaaaaaggagggtgacattactcccaatatcgggggggtgtacacccctttgtgatgtggttggtaatatccaggggggcagatgagggtgatatcactccccatatcgtggaaggcgtccacttttttgtgatgtggttctttatatcccgaggggagaaggtgatattactccccatatcgcgaagggcatacacccccctgtgatatagctcataatattccggagagtggaggaagatactatgccctatatcgcgggtggcctacaaccccctatggtttggcttataatatccaggggggagagggtaatattgctccccatattgtggagacgtacagccccctgtgatatggtttgtaatatctttggggggcgagggtgatattactccccatatcgcggggagcatacacccccgtgatctggttcatagtatctcaaaggaagaagttgatgtgtacaacttaagggaaaaagttgaagtgaagtgtacacacgccctgtgacgtggttcataatatccaggcgggggagaggagagtgatatttactccccatatcgcgggtgttgtaaactcccctgtgatatagttcataatatccaggggagagaggagggtgatattgctcctcatatcgcgaagggtgtacaaccccctgtgatatggttcataatatccagaagggtagaggacgatgatattactccacatatcttgggaggtgtgatatggttcgtaatatccagcgatgagagaatgatattactccccatatcgcaaaaggtgtgatagggtttgtaatatcctgagggggagagggtgatattaatccctatattgcagaaggactacaccctcccatgacatggtttgtaatatcccagggggtagagtgtgatattactttccatatcacagggggtgtgatatgattcgtaatattcgaagggggagagggtgacactactctccatatcacggggtgtgtgatatggttcttaatatcccaggggttagaggttgatattaccccctttttggggggtgtgtacaccccctgtgatatggttcgtaatatcccgggggagacagggtgacattattccccatatcgaggggatcgtacaccccctgtggtgtggttcataatatccctagggggagatggtgatattactccccatatcagggggcgtgcactcttctgtggtataattagtaatatccagggggcagaggtcgatattcgtttccatatcatgaagggagtacacttccctgtgatatggttcctaatatccaggggggagagggtgatattattccccatattgcggggggacatacaacccctgtgatatggttcataataaccagaaaagaagagggtgatattaatccccgtattgcagagggcatacaccccccctgtgatatggtttgtaatatctaggggaggaaaaggtgatattactttccatattgctgggtgcagacacccctttatgatatggttcataatatccaagttggagagggtgatattacttcccatatcatgggaggtatacccttccctgtgatatggttcgtaatatccagaaggggagagattgatattactccccatattgtggggggcgtacaccttcctgtgatacggtttgtaatatctaggggatatagtgggtgatattactcaccatatcacgggggttgtaacatggtttgtaatatccaggggaggagagggtaatgttactccccatatctcggggcatgtacaccctcctgtgacatggttcgtaatatccaggtcgggagagggtgatattactcctcatattgccgggggtgtgttatggttcataatatcctggggaaggaggctgctatcactctccacatcttgggggatgtacactctcctgtgatatggttcataatatccagggtgggtgagggtaatattactccccatatcgcgggaagtgtacatacccctgtaatattgtttgtaatagaagagagggtgatattactccccacatcgcgggtggtgcccacccccctgtgatatggtttggaatatccagggggatgaggagggtgatattactccccatatctcggtgggagtacatccctctttgatcaagttcataatatccaaaaggaaacaggagagtgatattactccccatatcgccgggggtgtacacgggagggggagtacacccccggcgatatggtctgtaatatccagggaaggagaggagggtgatattactcaccatatcgcaggtggtctacatttacctgtgaaacagtttgtaatatccagggggggaaatgagaatgattttttttttttgagtctcactgtgtcacccaggttggagtgcagtggcacgatcttggctcactgcaacccccgcctcctggactcaagcaattctcctctcccagcctcctgaatagctgggactacaggcgcaccccacaacgtctggctaatttttgtatttttattagagacggggtttcaccatattggccaggctgatctcgaactcctgaccctgtgatccatccgcctcggcctccaaaagtgctgagattacagatgtgagccaccacgcatggcccaaggagaacgatattactccccatatcccagggggtgtatatccccctgtgatatggttcagaatatccggaaggaaagacagggatattacttcccatatcgcaaggggtgtgacatggttcgtaatatcccatgggggagagggtaatattactcttcgtattgtgaagggcatacactcccctgtgatacagttcataatattccggggagtagaggaagatattatgctccatatcgcgggtggcataagccccctgtggtttggttcataatatccagggaggagagggtaatattactccccatattgtggggacgtacaccctcctgtgatatggtttgtaatatcccagaggggagagagtgatattactccccatattgcagggacatacacccccctgtgatatggttcaaaatgtcttttttttttgaaggactggttctttatttcaaaaagacacttgtcaatattcattatcaaaacagttgcactattgatttctctttctcccaatcggccccaagtagaccacatcaaaggagagtacatattaagccaataagctgtaggatgtacacctaacagacctcctagaaaccttaccagaaaatggggacagggtagggaaagaaactttaaaagatcaacaaactgccagcccacggactgcaggggctgtcacagccagatggggtggccagggtgccacaaacccaaagaagcaaagtttcaaaataatataaaatttaaaaagttttgtacataagctattcaagatttctccagcactgactgatacaaagcacaatgagatggcacttgtagagacagcagcttcaaactcagaaaagggtaatgagatgagtttcacatggctaaatcagtggcaaaaacacaatcttctttctttctttctttctttcaaggaggcaagaaaagcaattaagtgctcacctcaacataaggggaacatgatccattctgtaagcagttgggagggggtagagatggaacaaaattttggtctcagaggtcttgccatcttaatttggtcacttctaatgaaaaaaataaaaaatagaaataacattatccaaaggtatcttaaagctgaaaacttgaacagcacattttttgttgttgttgtttggctaactcctcctggaaccacctttctggcttagctagtactttgtacagagcaatgaggcttcccatagtggagtctccctgggctctgtttggctctcagcaaggcaggcctataccttttcctctcctccatggagagaggaatatgcattaaggtgaaaaatcaccttccaaaagtgagaaagggattcgatcgctgcttcagggctgtggtattatatggaatgttttacaaaaggttgctacaaaacaacaaaagaggtaattacaaaatgtgtacatcacaacatactttttaaagacattatgcattgtgctcacattcccttaaatgttgtttccaaaggtgctcagcctctagcccagctggaatctccgggaagaggcggacagtttggtgaaaaagacacagggaaggagcgggcggcggaaggagggggcggcgaaaggagaaagcagccttccagttaaagatcagccctcaattaaaggtcagcttcgggcaggctggcctcaggcggagtctggttcagagggaggagcagcagcagggtgagactgaggcgttctacatctcattcaggtcaagcagagtctggtccagcatcctttgtgtacagaggtgctcccctttggtgcatttcagtttatcttccaagtcatcaattgtcttttccagcttggctaccgatctctcagcaaactcagcatgggtctccgcctcctttattttatcagtaagaatcttgatctcttcctcatatttgtcttctttttgagagtacttttcttcagcagcactcagacacttcaggttctggtccatcagtctaatctgctcatccatctctcggcaaagggattctgccagctcagctcgttcctctgtgcgttccaagtctccttcaatgatcaccaacttacgagccacctcttcatacttcctatctgcctcttctgcaatgtgcttagcttctctgagttggatttcctggagttccatcttttcttcatcttttaaggcccggttttcaataaccttcttacctctctcactctcatcagcagctttttccgcttcttccagcttttgcagggcagtagccaggtgctcctgagcacggtccagctcctcttcaaccagctggatcccacgttcaaggaggccacctcagcctcagcctgttcccgggcccacctttctccctcaacttctcgctggaggcgctcagctcgctcctctgcatcatctgcctgctgctgcagaacctggatcttgcgcttcaccgcctcgatggtggtgatcccagccatggtgcccacccagctactgctagagctccggttcctgcctcctccgatcggcgttgcagcctcctctcacccttacttccgcctcggttcaaaatatcttaagggaaggagttgatattactccccacatcacgggaagtttacatcccctggtgatatggtttgtaatatcccagggtggatagggtgatattactctccatatcgcgaaggagtactcccccctgtgatatggttcataatatccttggggggagagtgtgatattactccccatatcgcgagggccatatactcctttgtgacatggttcgaaatatcccggtgggggagggggtagagggtaatattactccccatacagcgaagagcatacgcccttctgtggcaaggttagtaatacttcagggaaaagagtgcaatattacttttcatattgcagggaacatacactcccctgtgacatggttcgtaatatcccgggggctgagagggtgatatttctccccatatcaccgggggcctacacctgggtgtgatatggctcataatatacagggagggagagggtgatattactccacataccgagtgaggggttacacaccctcgtgacatgttcgaaataccccaaggaggagacaatgatattactttccctgtcgcgggggctacaccctcccagtgatatggttcacaatatcccggggtggagagggtgatattactccctatatcaccggggggtgtacacttccctgggaaatggtttacagtatccccggggggagagggtactattactccccatatcacgttacatatcagggtacacccccacgtgatatggtttgtaacatcccaggaggaagaaaatgatattactccccatatcgcggtggcatacacccctccccgttaaatggttcataatatcttggggtggagagggtgatattactccccatatcacgtggggcatacaccccactatgatatggttcataatatcccggaggggagagggagatattactctccatgtcgcggggggcatatacacccctgtgatatggtttgtgatatcccgggggcggagagggagatattactctccatatcgtggggtcgtacacttttctgtgatatgattcgtaatatccagacggggagagggtgatattacttcccatattgcgggggcgtacacccctctgtgatatggttcataatatcccgaagaaaagagggtgatattactcctcatatcgcggggaacacacaccaccctgtgatatggtttgtaatattcagcgggggagagagtaatattactccctgtatctcggatggcgtacactcccctgtgatatggttcataatatccagaagaaaagagggtgatattactccccatattccagggaatgtacaccaccctttgaatatggttcgtaatatccaggaggggagagggtaatattgctcccaatatcgaaggaggtgttatacggttagtaatatccagagaaggagagggtgacattactccccacatcgtggtgggtgtgcacccacctgtgatatggttcataatattcaggttaagagaggtgatattgctttccatatcgccaagggtgtacactcccgtgaaatacagttcgtaatatccaaaaggggagagggtgatattactcccatatcgtggggggtgtacacccctctgtgatatggttcataatatccagggtggaataaggtggtattactccctgtatctcggggcatgtacatcgcctgtgatatgattcataatatccagaagaagagagggtgatattaatctccatattgctgggggtgtacaaccccctgttgtatggtttgttacactgagttggggagagggttacattactctcaatatcgagtggggcatacacacttatgtgatatggttcataatatcccagggaggagagggtgatattactccccatatcgcgggaggcatacaccccaatgtgatatggtttgtaatatctacatttttttttttgagacgaagtctcgctcttgtcccccaggctggagtatgatggccggatctcggctcactgcaacctcagcctcccgggttcaagcgattctcctgccttggtcccccaagaagttgggattacaggcgcacaccaccacgcccggctactttttgtatttttagtagagaaggggtttcaccatgttggccaggctggtctagaactcctgacctcagatgatccacctgcctcggcctcccaaagtgctgggattacaggcgtgagccactgcacctggcctggtttgtaatatctatgaagggggaaggtgatattactttccatatcacgggaggcgtacaccacgatgtgatatggtttgtaatatccagggggtatactgggtgatattactccccatatcgcggggagtgtatacccttttgtgatatggttcctaatattaagctgaggagaaggtaatattactccccatatcgcaggggtttttatatggttcataatattcaggaagagagagggtgacattactctccatatcacggggtgtgtactcccccatgtgatatggtttgtaatatccagggaaggagaggttaatattactccccatatcgcagggggtgtacacctctctgtggtttgtaatatccaaagggaagaggatgatattatcttcaatatcttggggggatacagtccccagtgatattgttcataatatccagagggggaggggatgatattactcccaatattgcaggtggtgtacaaccccctgtgatattctttataatatagagggggatgatgatattactcccaatatagtaaacaacctgtgtgtacaccccctgtgatattgtttataatatccaagggtggaaaggatgatattactcctcatatcgcagggggtgtatacccctctgtgacattgttcctaatattcaggggaggagaagatgatactactcctcatatcacaggggatgtacacccccctgtgatacttttggtaatatccaggggaggagaaaattatattattccccatgtcacagagggtgtacaccccgctgtgatagtgttcataatatccaggtgaaaagaggatgatattactccgaatatctcaggaagtgtacacccttctgtgatattgttcataatatccaaaggtggagaggaggatactactccccatatcgcagtgggtgtacacccccctgtgatatggttcataatatccaatgtaggagaggatgatattactttccatatcgcggagagtgtacatccccctgttatattgtttgtaatattcagggagaaagaggatactactactccccatatcacacggggtgtatattcccctgtgatatggttcctgatatccaagagatattataatcctctcttggattatgctacctctcatatcgcatggggtgtacacacactttgtgatatcgtttgtcatatccaaggagggagaggattatattaatcccaagatcacggggggtgtacaccctcctgtgatattgtttgtaatattaaggggggagaggataatattactcccaatataattaacaccctgtgtgtactcctccttgtaatattgttcataatatccaatgggggagacgatgatattactttcaatatcgcagaggatgtacatccctttgtaacaatgtttgtaatataaaaggcaagagaggatgatactacttccaaaattgcaggacatgtacaccccccggtgatattgttcctaatatccagtggggaagaggatgatagtagtcccaatatcgcaaagggtgtacacaccccctgggatattgttcctaatataaaaggaggagaggatgctattattcccaatatcacagaaggtgtaaaatcccctgtgatattgttcgtaatattcaggaggggagaggattatattactcccaatatcacagggtgtgtacacagggaggggcaagggccagaagcgggcgggaatccccatgtttgggcggacccagtttctaatggccagcatttgccaatcaaagcttaccagagaactctaaaagccagggctttcctgctagacaagactcatttctggaactgctttaaaaagaaacaaaacttcccaaggaccccttttcctctctgtctgcctaaaataatgttttaaaaactcctaaagcagctgaattcagcccccttcctgggggaatgtatagacggaactcccacctttcccggcatcccaaggccagagtatgtgaaactcctgggtctctatgtgtgtctgagcggctgctctgccaacactccacacagccctgtgtcctggacccaaggcccttatgacctgagctcaagaggggatctcctgatccatgggttgcaaagatccatgggagaagcatggtttctggggcggggtcacacgctcagtcactgtttccctcggatgccggagatggttcctttggctctctgccaatacagggtgaatcatcatccatccctcttttctttgttctcccgggtcaagttgtttgcctagtcagtcccaatgtgagaacctgaatatttcagttgacgcgctgacttcaaaatccccgggcttcgggaggcggagcttgcagtgagccgagatcccgccactgcactccagcctgggcgacagagcgagactccgtctcaaaaaaaaaaaaaaaaaaaaaaaaaaaaaagtccccgggcttttcttttcactcagtggaaggcagctgcttctaattggccatcttggcccgcccccaccacgtgaccttctgtaaaatgcctccactctccaggaacgctctcattatataactttgcctgaaaccaacagcacgctcattgcacatatcatgggctcatttatttcacttataaagaacctggccaaggaagagatagtgcctaaagtggccagtattctgaccgatatgttagaaaaatggtgtgccgaccaattcatgacatgtgtcccaaaactagcaacggaaattgtattcgccgtgttgaggtctctaatccagatgatgctcatctatgtactggaaaaggcagagtcctttcctgacaagctgctgaaactcttcagaaacatctcatatttcctgaagaagatgatgtctggacaagcagcacaggtcgttcagatttaactttctattcatatatccagcacgatattcgcacaattgtcacgaaaccttaccagttgatgagtcctgcacatttcctttaatttcaggaggaagagggtaatccggatgagttttctgacctactctgctgctgtgattaaacaaccaccaggaaattttgacgacactgttctcctgagctcctccctttcctccgggaacaaaacaattgaatttacaaaaataaagtgttatttgactggagtgaggtctcatgtctgcttatgcggtggctcgctgctcagaacagggtgagtctctgggttgtgtgctgaggaggggaggctctcaatctggagaaaacccactgcaggggacacctccatggggtctgagggactgaggatgaggagccggactgggtctagggaaggaggaggtttcagagggtgaaattctggcactaaagcctgggggtgtttgggaacttcctccttccgaagaagtttcagggagggataaagacaaaccctgggctccttgaggggcccttactaatttgagaggactctatcgggaaggagagtgacaatggcctccttgaggactgaggcccctgaataaatgaggcccagatacagtccatgggggatgagaccttcaagggtcacattttggttgggacagaggaaaagtgcagctctgcagccgcagaggaaaacccggcagtgtgaaagcgaccttggaggggccctgtgcgctctgaatgcgtctgagcccccatcccctgtccccgcctctctttctggattcttccagctcggctgtctccgccatcttctgagcgctccaccctgacttattcaagtttcccttctgccttccaagtactccaaaatctttcagatctgtgtccctacccctgtttttagcatgtgttggggctccaggtccctgaaggtttctggcctgaaatccacctccccagcggagtggactgcgttctagagactccacactccgcgaggttcccaggcccctgagggacaaccgagtggcctgcgcacttcagggctccacactcggcaaggtctttcaagcccttggggtccccttcttagttttttccacctttctgggctgcagtcactccataaatgctgggatctgatccccacccccactctcgtttcctcaattctgcgggctacacgctctggcaaggtcctccgggccctggatcccctccctctccctatgcccacgctcctagtcagcccttctggggtccactattttcaggaactaaccgttctcatggagccttgctaaccggaaagctgtgtggaagaaaggctttgaggatagaggtggagatttggctcttccatagtgccactcacccaccccaccatgctgccactgccagacccggacccctgtttcagaacaagtgaccagattcgctcctggacagccctggacactggccttttctctgaaaactactcaccctttctctagtccccacttcatgccagcctcataccctcttccttcccccacgctggcttccgggatcctcctctgctcagacaacctcttctgtgtcccacccccgtttttagaatgctttggggcaccaggttgggggaaggtttctggcctgatatccatctctttccaaactcccttcttcccttgaaaggcttcttgccttcagccccacttctggctccgaggtttcaggacaccctcctcttcatcctcattcttttgaccaccagctttttaggaattcgaacgtccctctcatcttcgtgaatcctgtccaggcatttgttgaccccttcatctgatacccctgacctcacattgccaaaagtctacccctacccagtacactggaattagacaaaatcccaggagttttacctcaactctgagtgtgcccacaggagctctccctgaagccacgtccttttaagcagggtctagggttcctcccttgtcttaatgaactctttgtcacacggaggacgttatggagcccttatgatctttcactgcctttctgcccagcgttttgtctttccatggacatttataatattttccatggacattttgttctctcaatgtccacccctaatttccaacatcccaaagattctcatgtgtttcctgaaagccatttacaggaatggctgtgcccagacccccttccccaggatcctccttcacacctggtaggtgcctctcctagagagatttgcactcagttgtcgtgcagtcacatggcccagatggttgttaatcacccccttcctggcaacagctagcagccagggaatcactggcacagaaacctcagggtgaccaagatgaggccacctctgtgctgaaggctgtgctccagagcctgcttgggatcaggcttaagcaggtcttcagccagacctgatgttacctggtttccttgagctgccctgcctgagctatcgggagcactccctcaatgcacatcttgattccctatctcatgctctgcttctagaaaccatgagctatcaattgctactggcaatggtcctgggaagtcaaccctaagtatggattctggggttggatgactccccacaggacttcagtgagcaacaatcactgctggcagttggaggacagagtcgctagggcatgtgaccactgtgaaaccaccgatgtttcacctggggtaattttggatgaactacggtagaagcactgaaggtacattgcttttggtttggaagattgtaggtaaataatagcgatatgaatgtggaattggatggctgcaaacgagtgccattgatgcattgaaagaggaaaagtcaggctgtcacctgtcactcagcaatttaaagtgtgagagttgggactagatgtggtggctcacatctataatccagagattcgggggaagcttgaagaggtaggatcttttgagtccaggagttccagaccagcctggacaccagagcaagacctcatctctacaacaaaattttcttaaaaattagatgggcttggtggcacgcacctgtacttgtagatctagctaatggggagcatgagataaaaaaatcacctgagtcagggacttaggggttacaatgaggtatgattgtgccagtgcacacactcccacctggccaacagagtgagattctgcttccaaaaaaataagaaataaatcaggtttgagagttggaaagcatcatcttctcctagagccaaaggacatgtacaactgagacccaggaacaaagcttcatcacaaagagaccatcatcagtggagccgggagatgcattccccctcaccctgccttgaggaggcagtggagtcatctgtctgggatcctttctgacccagccctatttgtttgtctctttggcttctttggatttgtatattttagctgttataacactgtaaaacaaacagagtgatttttttgagttgtgtgaatgatgctagctccatagtcaccctgagagtgatgggaacttttgaatttgtggcaagttggagggtagtgtaagtgacctgagattgccaaattggggctagcactggatgtgaggttaggctagtggaaaaatatgcccagaaccagaggagtgtgggctcactgcaggtggttaggctcagatccaaattgtacagatggatagctttggggtaaagaataacatagttgagaagtgcatgtgttagtctgttcatgcactgctataaagaattacctgagactgggtaattatttataaaactcaggtttaattgggtcatggttccacaggctgtacaaaaagtatgatgctggccatcagctcaacttctggggaggccccagaatagttagagtcatggcaaaaagtacaagggaagcaggctcatcttccacggccagagctggagcaagtggtaggagaggtgatacacactttcaaacaagtaggtcttttgagaactccatcaccggacagcacctatgggatggtgctaaattattcatgaaatatccgcctccataatccactcaactgtcaccagcgcagccagccccacctccaacagtggggattacaattccatatgaggtgtgggtggggacacagctccaacctcaatcagtgggcatcctggattgggtctactatagaaggagaaccaggagctgactatgatcttgaaccctacccatgatggccgggcggggtgactcatgcctgtaaccccagcactttgggaggctgaggtgggtggatcgcctgaagtcaggagttagagaccagcctggccaacatggtgaaaacctgtctctactaaaaatacaaaaaattagaccggcgttgtgctggatgcctgtaatcacaccactacgctccagcatgggaaaaaataccaaaacttcgtctcaaaaaaaaaaaaaaaaaaaaaaaaaaaaagactgcccatgaccactgcaccagtgagagggacaccagcatcactgagatgcaagggctggacattcttcataggtcagagctcaaagcaggggacactgatacagagatgggctccatccatagcaccaaagtggtgagaggatgtgggaatggcagaggccagcactttgccatcaatgcaagggggtataaggaggtgacaccagtgccagagtacatcacggggggactgccctacaatatctaggacttacctcttagagcgtgtttcattagcgacaacagatataaatggcagacaggtgtgtccctgcattaacaggaaatagaaatcatcaagaggaacagaaggcagatgtcagcagccccttagaaagtcatcatccttcatacagttaaaatctgagacagttctcacacgagaaggcctaactcaaaaagaggctgggttctcatgaggcaggtttatgcaaaaccaaggaaggtgtacaagtttggaattctccagtttcccttggaaaagacctacagtcatttgcttaggtaactgagcactgaacaaaggtgagtattgttgtcttttagaagctcttggccaagaaggccttgttggcataaaacccatggtttggaaacatcaccatgacccctgttagagtaatggcctaagggtgggggtcaggaaattgatgtattccttgccaacttctgcctctaagtgagtgaactctgtttgtgaacctctctcctctgtggttatgttcctaggctctcatgtataatcaggagtcatagacttagaaacaggaaaaatacttacagtgtttttgtggcctgtgagctatgacttataattttaggaaaaaaacaattgcaaatggaaagcctaagtctatcaatgctcatccaagacaacataatcaataaaaaccaatatcaaatctcaaggcaaattatttcctgtatatagatggcagagatgagcaccaccatcaaaaactcaaggaccagtgctgtgggtccagtcatctgtttcatggaattcaccagtctggtatcttcaaaatccagaaggatgatggcagatggcaggaaagtaatgcaaacgtcatcaggtgtgaccccactgtagcagctgtgatggatgttttctctcaccatagcaataaataacacaacctcggtcacactgtatgcattgttggtctgcaaaatccatgttttgcaaaactcttcaggaaggtggatctgtaatattggcattgacatgagaacaacagcagtatttattcacaatctcaagctctctgtcttcccgtctctctcattagccatccaagtagtcctgaggaaccaagcccatcagaacattctgcaacataatacacagctccattctccattcaaattttgttgttgttgttgttgttgatgagacaacatcttactccatcagccaggctgacgtacagtggggctatctgggctgactgtagtcttgagcttccaggctcaaggcatcctctcacctcagcctcctaagtggcttgaactacagacacacagcgacatgctgggctagtttttgtatattttgtagagacgtgctctcaccatgttattcaggctggactcaaactcctgagcgtaagtgatccaagcaccttggcctcaaagtgctgagattacaagcctgagccactgcacccagcccaatctccattctactgataacaatgtcattaccaggtctgatggacaggaaatggtaaggtttctgaaaacctaaggatcacacagcgagttccaaaggctgaaagtgcatacctgtcgacactgataccaatgacatccaatggtgagaatgacattccttgtagtcctagctctgctcataacaaatctatactgaagtgtaagagtttgatggtcatggggattttccatgtctctgcctttcagcgatgtgccatatctgtgaagtgttcagaaatgcaacagcctgaggcatgctgggcatatcctctaataaaaaggaaaatgccattttatggtcctgtatttctacaagttggaacacatgggcctgtgatccagatgggggaaatgggaatattcccactcattcaccttcatccacgaagcccatttgaaagctttgggcttcccatccttgtagattttagtgttgtgggctgggtgcagtggctttcacctgtactgccaacactttgggaggcctagacaggtgaatccactgaggccaaaagttcgagaccagcctggccaagatggtgaaaccccgtccctactaaaaatacaaaaattagcaaggtattggggccagcacctgtaatcccagctgctcgggaggctgaggctggagaatcgcttgaacccaaaaggcagagactgcagtgacccgatcctgcctttgcactccacctgggcaagcagaacaaaacttctgtcttgaaaaaaaaaacaaaaaacgaacaaaaaagatgttagagttctgggtttagaggtctataccccagaaagagaatggtttcaacaagggacaaagaagttgctttaaacgttgacttgccatttcttttcagtgtgtttgttctcttgcgtcaagagaccaccagaaaagtggtgcaattactctcctgtcaagaatcattgactatcatctgcaagagggtcagatcctggtatataattagggcagaaatacttagtctgagaagggtatgacatccagaggccctattaatgatgtccttttctccatgcctgactctgaccccatgtgctggactgcccctgtgtggatggcctcatggcctgctcggactctgaggtcccaccccaagtggcacctccatggagggctctactcttgtatgggctctgacactcacactgagacactctcccatggacacctcttcacccacttggggtctgaaactgggctactccatccctccctaacctggaacagagagctttcactgctattacacaagtcatagaggctaactcctcatttttccaagctaattattgaaacattagtcctgggttgataagacaagataagttaacttttcataaatttgcttatcaagttttgaataaattcaaataaattcaccttccccacacaccttagttgtcgacatcacacgcgcacccatactcacagggtgagcacgaaggcttcactgtcagtggagaaagtggcaaaacccttctgtgcctcatcctggtctagacctggccctcatcctttcccactcttcccctcactcccttggattcatccacactggcctcctgcctgctgctccacctccctgcgaagctcacccctgcctcagggcctttgcacgtgcagtggcttcaagccatatcctcttcacccagatctcccagatctcctgaatgatcttcttttatcattcaggtctcagcttgcatgtaatcttctcagtgaggattacccaaaccacatagttcattcattcattcaaatattcattcaatggcatattgacaaagcagctacttcatgccaggccttgggccaggtgttatggatatggcaacaaacaaaacaagagttttctgctctcaaatttttacccacttaaaggagatatcatacatcatctgtaaataaatacatcatctgtaaataatgatgtaaataaatacatcatctgtaaatctgtaaataatgatgtaaataaatacatcatctgtaaataaataaagtataataaaagaaaatagtaggtttttttggttggaggtgaccgtgaagtttgcaaataccatcttacaacacattattttattttatttcatttcatttttaattttattattattatactttaagttttagggtacatgtgcacaacgtgcagatttgttacatatgtatacatgtgtgaagttggtgtgctgcacccattaactcgtcatttagcattaggtatatctcctaatgctatccttcccccctcccccaccccacaacagtccccggtgtgtgatgttccccttcctgtgtccatgtgttctcattgttcagttcccccctatgagtgagaacatgcggtatttggttttttgtccttgtgatagtttgctgagaatgatggtttccagcttcatccatgtccctacaaaggacacgaactcatcattttttatggctgcatagtattccatggtgtatatgtgccacattttcttcatccagtctatcattgttggatatttgggttggttccaagtctttgctattgtgaagagtgccgcaataaacatacgtgtgcgtgtgtctttatagcagcatgatttataatcctttgggtatatacccagtaatgggatggctgggtcaaatggtatttctagctctagatcactgaggaatcgccacactgacttccacagtggttgaactagtttacagtcccaccaacagtgtaaaagtgttcctatttctccacatcctctccagcacctgttgtttcctgactttttaatgatcgccattctaactggtgtgagatggtatctcactgtggctttgatttgcatttctctgatggccagtgatgatgagcatttcttcatgtgttttttggctgcataaatgtcttcttttgagaaatgtctgttcatatccttcacccactttttgatggggttgtttgtttttttcttgtaaatttgtttgagttcattgtagattctggatattagccctttgtcagatgagtaggttgtgaaaattttctcccattctgcaggttacctgttcactctgatggtagtttcttttgctgtgcagaagctctttagtttaattagatcccatttgtcaattttggcttttgttgccattgcttttggtgttttagacatgaagtccttgcccgtgcctatgacctgaatggaaatgcctgggttttcttctagggtttttatggtttgaggtctaacatgtaagtctttaatccatcttgaattaatttttgtataaggtgtaaggaagggatccagtttcacctttctacatatggctagcctgttttcccagaaccatttattaaatagggaatcctttccccacttcttgtttttgtcaggtgtgtcaaagatcagatagttgtagatatgtgacattatttctgaggactctgttctgttgcattggtctatatctctgttttggtaccagtaccatgctgttttggttactgtagccttgtagtatagtttgaagtcaggtagcatgatgcctccagctttgctcttttggcttaggattgactttgcaatgcggggtcttttttggttccatgtgaactttaaagtagttttttccaattctgtgaagaaagtcattggtagcttgatggggatggcattgaatctataaattaccttgggcagtatggccattttcacgatattgattcttcctacccatgagcatggaatgttcttccatttgtttgtatcctcttttatttcattgagcagtggttttagttctccttgaagaggtccttcacatcccttgtaagttgggttcctaggtattttattccctttgaagcaattgtgaatgggagttcactcatgatttggctctctgtttgtctgttattggtgtataagaatgcttgtgatttttgtacattgattttgtatcctgagactttgctgaagttgcttatcagcttaaggagattttgggctgagacaatgggttttctagatatacaatcatgtcgtctgcaaacagggacaatttgacttcctcttttcctaattgaataccctttatttccttctcctgcctaattgccctggccagaacttccaacactatgttgaataggagtggtgagagagggcatccctgtcttgtgccagttttcaaagggaatgcttccagtttttgcccattcagtatgatattggctgtgggtttgtcatagatagctcttattattttgagatatgtcccatcaatacctaattattgagagttttcagcatgaagggttgttgaattttgtcaaaggccttttctgcatctattgagataatcatgtggtttttgtctttgggtctgtttatatgctggattacatttattgatttgcatatattgaaccagccttgcatcccagggatgaagcccacttgatcatggtggataagctttttgatgtgctgctggattcggtttgccagtattttactgaggacttttgcatcaatgttcatcaaggatattggtctaaaattctcttttttggttgtgtctctgcctggctttggtatcaggatgatgctggcctcataaaatgagttagggaggattccctctttttctattgattggaatagtttcaggaggaatggtaccagttcctccttgtacctctggtagaattgggctgtgaatccatctggtcctggactgtttttggttggtaagctattgattattgccacaatttcagatcctgttattgctctattcagagattcaacttcttcctggtttagtcttgggaaggtgtatgtgtccaggaatttatccatttcttctagattttctagtttatttgcgtagaggtgtttgtagtattctctgatggtagtttgtatttctgtgggatcagtggtgatatcacctttatcattttttattgcatctatttgattcttctctctttttttctttattagtcttgctaccggtctatcaattttgttgatccttttaaaaaaccagctcctggattcattaattttttgaagggttttttgtgtctctatttccttcagttctgctctgattttagttatttcttgccttctgctagcttttgaatgtgtttgctcttgcttttctagttcttttaattgtgatgttagggtgtcaattttggatctttcctgctttctcttgtgggcatttagtgttataaatttccctctacacactgctttgaatgtgtcccagagattgtggtatgttgtgtcttttttctcgttggtttcaaagaacatctttatttctgccttcattttgttatgtacccagtagtcattcaggagcaggttgttcagtttccatgtagttgagcggttttgagtgagtttcttaatcctgagttctagtttgattgcactgtggtctgagagacagtttgttataatttctgttcttttacatttgctgaggagagctttacttccaagtatgtggtcaattttggaataggtgtggtgtgatgctgaaaaaaatgtatattctgttgatttggggtggagagttctgtagatgtctattaggtccgcttggtgcagagctgagttcaaatcctgggtatccttgttaactttctgtctcattgatctgtctaatgttgacagtggggtgttaaagtctcccattattattgtgtgggagtctaagtctctttgtaggtcactcaggacttgctttatgaatctgggtgctcctgtattgggtgcatatatatttaggatagttagctcttcttgttgaattgatccctttaccattatgtaatggccttttttgtctcttacgatatttgttggtttaaagcctgttttatcagagactaggattgcaacacctgcctttttttgttttccattttcttggtagatcttcctccatccctttattttgagcttatgtgtgtctctgcacgtgagatgggtttcctgaatacagcacactgatgggtcttgactctttatccaatttgccagtctgtgtcttttaattggagcatttagcccatttacatttaaggttaatattgttatgtgtgaatttgatcctgtcgttatgatgttagctggttattttgctcattggttgatgcggtttcttcctagccttgatggtctttacaatttggcatgtttttgcagtggctggtactgactgttcctttccatgtttagcgcttccttcaggagctcttttagggcaggtctggtggtgacaaaatccctcagcatttgcttgtctgtaaaggattttatttctccttcacttatgaagcttagtttggctggatatgaaattctgggttgaaaattcttttctttaagaatgttgaatattggcccccactgtcttctggcttctagagtttctgccaagagatcagccgttagtctgatgggcttccctttgtgggtaacccgacctttctctctggctgcccttaacattttttccttcatttcaactttggtgaatctgacaattatgtgtcttggagttgctcttcttgaggagtatctttgtggcattctctgtatttcctgaatttgaatgttggcctgccttgctaggttgcagaagttctcctgggtaatatcctgaagagtgttttccagcttggttccattctccccatcactttcaggtacactaatcaaacgtagatttaatcttttcacatagttccatatttcttggaggctttgtttgtttctttttactctctttcctctaaacttctcttctcacttcatttcattaatttgatcttcattcacttatatactttcttccacttcatcaaatcggctactgaaggtattgcatgcatcatgtagttctcatgccatggttttcagctctatcaggtcatttaaggtcttctgtacattgttttctctacttagccattcgtctaatcttttttcaaggtttttagcttccttgtgatgggtttgaacatcccctttagctcagagatgtttgttattactgaccttctgaagcctgcttctgtcaacttgtcaaagtcattctccatccagctttgttccattgctggtgaggagctgcgatcctttggaggagaagaggtgctctggtttatagaattttcagcttttctgctctggtttctccccatctttgtggttttatctacctttggtctttgataatggtgacctagagatggggttttggtgtggatgtcctttttgttgatgttgatgctgttcctttctgtttgttagttttccttcgaacagtcaggttcctcagctgcaggtctgttggagtttgccggaggtccactccagaccctgtttgcctgggtatcaccagcggaggctgcagaatagcaaatattgcacaacagcaaatattgctgcctgatccttcctctggaagcttcgtctcaaaggggtgcctggctgtatgaggtgtcagttggcccctactgggaggtgtctcccagttaggctagatgggggttagggacccacttgagaaggcagcctgtccattcacagagctcaaacactatgctaggagagccactgctctcttcagtgctgtcagatggggatgtttaagtctgcagaaatttctgctgccttttattcagctatgccctgcccctacagatggagtctacagaggcaggcaggcctcattgagctgcggtgggctcctcccagttcgagcttccagaccactttgtttacctactgaagcctcagaaatggtgaacacccctcccccacccagtctgccgccttgcagttccatctcagactgctgtgctagcagtgagcgaggctccatgggcgtgggacccactgagccaggcacaggatataatctcctggtgtgccatttgctaagaccattggaaaagcacagtattaaggtgggagtgtcccaattttcccagtacagtctgtcacgggttccctcatctaggaaaggtaaatcccctaaccccttgtgcttcccggtgacgcaatgccccaccctgcttcagctagccctccatgggctgcatccactgtccaaccagcccaatgagatgaacaaggtacctcagttggaaatgcagaaatcacccatcttctgtgtggatcaggctgggagctgcagaccggagttgctcctattcggccatcttggaatggcaatctatgtttgctttttacatttgaaaaaactggtgtcacgtacctaggtattaatcattgtggtatcctcttgccgatttacctctttatcattaactagtgaccctccttgtcttttgttgttacagtctgtgattttagtctattttatctaatatgagaatagctactctggcacttttttggtttccagcttcatgaaatatccttttccatttccctgttttcatttccctttcggtgtctctatagatgaagttgatttctttaaggcaccataagttgggtcttatttctttatccatttgaccatttagagaatttagaacactgtcagtgttattattcataagtaaaaacttaagagtgggtgtagtggtgtacatctgtatttcctgcactttgagagactgaggcgagctgatctcctggggtcaggagtttgagaccggcctggtcaacatgatgaaaccctgtctctactaaaaatacaaaaattagccaagcatgctggcatgtgcctgtaatccaatttacttgggaggctgaggcaggagaagcttgaacctgggagacaaatgttgcagtgagctgagatcacacagagaagtcatctccactctcctcatcagaacctcttgttcacagcatttgtgagcacaaatcaatgatggttattctttcctactaattagggatattttattacacagcaatagcctccagcaaagggaaccatcatacatgattcctacaagttgacagggctggaattatcactgaaaaactaaggtggctatacttgattcccaatgtccaatttttcatgaatagagaaatttatcctttttccccccagccagaaaccaagttttgctcttacgcccaggctggaatcaagtggcacaatctcagctcactgcaacctctgccccccagcttcaagaaattcaccttttgaacaaggagatattaaggatacactatgtgtatgctaccggtggttgcaggagactcagaaaagagagaaacagtcactggcctcgtgcaactgatattctcgggaggagagaaaggcaatcaagaaagaaacatgctgtatttcagacagctgtaagtcctccacaagaaaagaaagcaggtgaggaacataggaaatgtgtcaaccataaggttcccgctaattctataagttggtcagggatatcctccaagaataagcagcatctgagcaatcacctgaagggaggaaggaaggaagactgtgagtggtggcttacacctgtaatcccagcactttgggaggccaaggagggcagattgcctgagctcaggagttcacgaccactcagagcaacctgttgatacccaatctctactaaaaacacacaaaaaaattacccgggtgtggtggcacgcacctgtagtcccagcttccatgcccagctgatttctctctctccatatatatatatatatacacatatattgtttttgcagagatagggtctcactgtgtcacccagtcatcaagcaattctcttatactgttttggaaaagcatgggaattacaggtgtgaaataccctgctggtcctgaaaaatgtgatatttgggattctctgcctggcttgttttacccaaaataatgacctccagttccttccaggttgctgcaaaagacatgattttcactgttttataactgaatagtattcctgtatgtatacataccacattttctttatttattcttctgttgattgacatgtagggtgattccatgtctttgctactgtaaataatgctgcagcaaatatttgtgtgcattttgatctattcctttgagtaggtacccagtactgcaactgcaggactgagtagttgttatattttttgttctttcagaaatctccatagtgtttgccataaaatctgcactaatttacattcccaacaacaatgcataagatttccccttttctccacattctcactaacatttgttatgtttttgtctttttcataatacccattctgactggagtaagatatctcattgtggtggttgttgatatttttgagacggggtctcactctgttgccagactggagtgcagtggtgtgatcgtggcttgctgcaacctccacctcccgggttcaagcaattctcctgcctcagcctcccgagtagctgggactacaggcgcgtgccaacaggcctggctcattttttgtatttttagtaaagacagggtttcaccatgttggccaggatgatcacagtctcttgagctcatcatacacctgcctcagcctcccaaagtgttggaattacagtcatgaggcagcgcacccaacctcaatgtggttttaatgaccatttctctgacgattcatggtgtggagaatttctttgaaataccttttggccatttatatgtgctcttttaaaaactgactcctgtccaggtgcggttgagcatgcctgtaaccccagaacttcgggaggctgaggccaatggatcacttgaggcaaagaggcagaaatcagcctggccaacaaggcaaaaccccatctttactaaaaatacaaaaaatcagccacgggctgtgactcgtgcctgtggtgcaagttactcaggaggttaaggcacaggaattgcttgaacccggtaggcacaggtcacagtgagccaagatcatggcactgcactacagcatgggtaatagagaaagacctgtctcataaaaacaaatgaataaataaataagataaaaaataaaaaagtctctttatgtcctttgccgactttttaatgggattctttggagttttctgttgtagttgagatctttgtttactctcggtattagtcttttgtcaaaggaaaagtttacaaataatttcttccgttctgcagtttgtctgctcactctgttgagaggattatttctttggctgtgcagcagctttttgtttcagtaaagcttttgaatttatataattaaaattttcagtttggtttaaatttgcactggtcgatttttggttttgttgcctgtacttttgaagtcatactcttgaactctttactagacaataaccagaagagttttctctagttttcttctcacatttttattatttcagtacatatatttaagtctataattcatcttcaattgatttttgtagaaatagtgagaaataggagtccaggtttattcttctgcaaatgacaattcaattgttccagcaccaattattgaaaagggtgtgctttcctcaacgtatattcttatcagctttgtcaaagatcagttggctataaatgtgtggctttctttctgggctctctagtctgttacatcaatctgtgtgtctatctgtatactactaccatgctgtattggtgatgatggctttgtaatataatttgaagtcaagaaatgtgatgctcccagctttgtttatttgcttcagaaaggctgagtcaacagctgcagagatgaagctgcccctcctcgcagggctccttcccggaaaaagatcatggctcccactgaccatataaccatggctggaactcctgaaattcccaaagggaggccctacccagtgaggggggatgaatgaaggtcctacttaaggaatctgtctggccacaatcaggcacagcagctgtgctgccttgtgggggaccagaccacctggattccctggagcctgcaggctagaatgtctgagtccatggaaacacagaaatggaggccgccctcacctccccagaaaactgtagtctcaggcagtctccagccgattgccactggttggctgctattccaagccagtgggtcttaacttgagaggtgctgtggaagtggggcccacggaatgaggctgcttggctccctggattcagccccttttctaagggaatgtacagatggaactcccgccttgcccagctttccaagtatataaaactcctgagtctctgtgagtgtctgagcgagtgctctggcaacattcgacacggctctgtgtatctgacccaagacccttatggcatgagctaatgggaggatcttctgatccatgcgtggcaaagatgcatgggagaaacatggtttgtgggtaggggttgtgcattcactactgcttctcttggctgtaggtgaaggtttctttggctctgtgctgatactgggtgcaccatcacccaccccctttgtttcttctcctgggtcaagtcatttgcctaatcagtcccaatgtaggaacctggatacttcagttcaaggtgctgaattcaccgtgcttttcattcaggggaagacagctgcttctcattgggcatcttggcctgcccacttcacgtcactttttgtaaaatccacaccactccaggaatatccattacttaacttcgcctgaaataaacagaaggctcattacacttatcatgggctcacttacttcgcctataatgaaggtgccatggaaatgctagtggatgacgtggtccattttcttagggatgagatagaaaaatggtgtatggctttttaatttaattaaaatttttagtttggtttaaatttacattggtctctttttggttttgttgcctgtacttttgaagtcttactcgtgaactctttactggacaatgaccagaagagttttccctaagtttcttctgatattttgaccatttcagtacatacatttcagtctataattcactttaaattgatttttgtaaacatggtaagaaataggagttcagatttattcttccgcatatgataatgcaactgtcccagtaccaattattgaaaagggtgtgctttccctagtgtatattcttgtcagctttgtcaaagatcagttgcctatgaatgtgtggctttcattttggattctctcgtctgttacatcaatctgtgtgtccacatttatacctgtaccatgctgtattggtgactatggctgtgtaatatattttagagttaggaaatgtgatgctcccagctttgttcatttgcttcagctgaaaaggttgagtccacaattacaaagatggcagccgcccatccccggaggacctccaacccagaaagagatcaggcttcccaccaaccctataaccctggctggagttcctgaaattccaacagggaggaccttcccagtgaggagggatgaatcaaggtcaaatttaaagaaacagtctggccactatcaggcacagcagcagtgctgccttgtgggggacccctcctgctccagaccagctgccctccctggagcccgaaggctagattgtctgagtctacggaaacagagacggtggccgccccaaccacccagaactcggtagtctcaggcacttggcttgctatcttgccactgcttggctggtattccaagcccgtgggacttgagaagtgctgtgatgatggggaccacaggatgaggctgtctggctccctgtgatatggctgtgatgagtggaggaacaccagggctcatgtctcacacagaattggagaaaatgacacaaacacatgtacagtggttttatggcgtgcagtttaataggcaagaacgaaggaagagctccccatactgagacagagggaggggggctccaaagccaaaagaggaaacccggagtgctgtggataccaatgagttatatgaagaaactggagggggcggtgtctgatttgcatagggttcaggcgattggttcgaccaggcatgtcatttatgtggcccacggaaaaactggccctcccacctagcctttgaatatgcacgtgccggacaccctgatttcctacactcatggggatatatgggggtggccatatcgccaggcacaggtggggacaagggccagaagagggcgggaatcgctatgtttgggtggacccagtttctaatggccggcatctgcagatcaaggttaccggagaactctaaaagccggggctttcctgctagacaagactcatttctggagctgctttaaaaagaaacaaaacttcccaaggaccccttttcctccctgtctgcccaaaataatttcttaacaactcgtataacacctgaattcagcccccttactgggggaatgtaccaacggaactcccacctttcctggtttctcaaggctagattgtgtaaacctcctgggtctcggtctgtgtctgagcagctgctctgccaacactccacacagccctgtgtactaggcccaaggccgccgtgactcagcccatgggaggatctcctgatttcttggttgcaaagatccatgggagaaaaatggtttctggggcggggtcacacactcatggcttctcttggctgtgcaagaaggttcctttggctctgttccaatatagcgtggttcatcacccacccctgttttctttgttctcctgagtcaagttgtttgcctagtcagtcccaatgtgagaacctgaatatttcagttcacgtgcttatcgtgaaattcactgagactttaattcagtggaaggcagcctcttctaattggccatcttggcccgccccctccacgtcacctcccataaaatggccacgctctccagggacgatgccattatatatctttacgtgaaaccgacagaacacttattacactttttgtgagctcatttacttcacttataatgaacatggccatggaaatgctagtggagaaagtggtcgattttctgatggatgtgataaaaaaatggtttgccgaccaattaatgacatatgtctcaaaactagtaacgagacccttaatcgctgggttgaagtttctaatcaagaagatgctcatctatgtattcaacaaagcagcttcccttgcttctgaaatgcttccaaacaacatctcatatttcctgaagaagataatgcctggacaagcagcacaagtcattcaggtttactttcagctcataaatccagcaggatattcgcacaattgttgggaaaccttatcagttcatgagtcgtgcatgtttcctttaatttcaggaggaagagggtaatctggaagagtttcctgacctactctgctgctgtgattaaacaaccaccaggaaattttgatgacactgttctcctgagctcctccctttcctcggggaagaaaagcattgaaactacaaaaataaagtgttatttggctggagtgaggtctcatgtctgcttatgcggtggctcgctgctcagaacagggtgagtctctgagttgtacgctgaggaggggaggctgtcaatctagaaaaaacccattgcatgggacacctccatggggtctggggggctgaggatgaggagctggactggatctagggaaggaggaggtttcagagggtgaaattctggcagtaaatcctgggggtgtttgaaaacttcctccctcagaaggagaagactcagggaggaataaggacaaaccatgggtcccttgaggggcatttactaacttaagaggactttatcgggaagcagagtgacaatggcctccttgaggactgaggcccctggataaatgaggcccagatccagatccagtccatgggagatgagaccttcaagggacatatttttgttgggacagaggaaaagtgcagctctgcagctgcagaggaagccttggcagtgtgaaagcgaccttggagggggccctgtgcgttctgaatgcttctgaggtccatcccctgtccccgcctctttttctggattttttgggctccatggtctccgccatcttctgagcgctccacgctgccaccttcagttttctcttctgggctccaaatactccaaaatctttcatatctgtgcccctacccctgtttttagcatgtgttgggactccaggtccctgaaggtttctggcctgaaatccacctccccagcggtgtggattctgctctagagaccccgcacttggcaaggttcccaggcccctgggggacaaccgagtggtatgtgcacttcagggctccacactcggcaaggtctttcaagcccttggggttccctcctcagttttcttcacatgtctgggatgtagtcactctataaatgccgggatgtgatccccaccccagtgattttttttagttccatgagtgttgctatctgaatagtcatcctgagagtgatgggaccttttgaatttgcagcaagttttagattagtgtgagtggcctgagatcgcaaaactggggctagcattggatgtgaggttaggctggtggaaaaatttgcccagaacctgaggagtgtgggctcactgcaggtggttaggatcagcacagaattgcaaggatgtatagctttggggtaaagaataacatggttcagaagtacatgtattagtcttttcatgcattgctataaagaattacctgagactgggtaattaattataaaaactcaggtttaattggctcatggttccacaggctgtacaaaaaggatgatgctggccatcagctcaacttctggggaggcgtcagaaaacttagagtcatggcaaaaagcacaagggaatcaggctcatcctccatggccagagctggagctagtggtaggagaggtgctgcacacttttgaacaatcagatctttttagaactctatcaccagacagcacctagaggatggtgctaaattattcatgaaatatccacccatatgatccactcaattctcaccggcccaaccaggaccacctccaccattggggattacaattacacatgagatgtgggtggggacacagatccaaactcgatcagtgggcatcttggactgggtctactatagaagaagaaccaggagctgactatcatccttaagactgcccatgatggccaggcagggtggctcatgcctgtaatcccagcactttgggaagccaaggtgggtgaatcccctgaggtcaggagtttgagaccagcctcgccaacatggtgaaaccctgcctctactaaaaacacaaaaaattagatgggtgttgtgccagacgcctgtaatcacagctactccagaggctgaggcatgagaattgcttgaacctgggaggcggaggtggcggtgagccccaatcgcactgctacactccagcatgggcaacaataccaaaacatcgtctcaaaaaaaaaaaaaaaaaaaaaaaaggctgcccatgaccactgccccagtgagagggacaccagcatggctaagatcaagtgctggacattcttcatgggtcagacattaaagcaggccacactgttacagagatgggctccattcatagcaacaaagtggtgagaagatgtgggaatggcagaggccagcactttgccatcaatgcaaggtgggcataaggagctggcaccagtgccagagtgcatcaggggaggactgctttgcaatatctagcacttacctcttagagtatgtttcattagggacaacagatataaatggcagacaagtgagtcccttcagtaacaggaaatagaaatcatcaagaggaacagaaacagatgtcagcagccctcatataaagtcatcatccttcatccagttaaaacctgagacagttctcacataagaaggtctaattcaaaaagagactgggttctcatgaggcaggttcatgcaaaaccaagggaagtatacaactttgggattctccagcttcccttggaaaagacctacaatcatttgcttaggtaactgagcactgaacaaaggtgagtattgttatctttcagaagctgttggccatgaaggtcttgctggcataaaacccatggttggaaacatcaccatgacccctgttagagtaatggcctaagggcaagggtcaggaaattgatgtattccttgccaacttctgcgagacgagtgttggtccactcatctctttcacggaattcaccagtctggtatcttcaaaatccagaaggatgatggcagatggcaggaaactaatgcaaacaccatcagttgtacctccactgtagcagcagtaatggatgttatctcttcattgtaatatccagggagggagaagatgacattattctcaatattctaaacaccctgtgtgtacagcctctgtgatattttttgtaatatccgtgtgggagagaattatattactcctaatatctcaggggttgtgccccctctgtgacaatgttcctaacacccaggaggggataggatgatatcacttttagcatcacagggggtgtacaccccactgtaatattgttcataatatccgggggggagagaatgatattactcccaatatcgcaaagactgtacaccaacctgtgatattatttgtaatatccataagaggaagaataatattactcccaatgtcacaggaagtgtacacccttctgtgatattgttcaaaagatccagttagggaggggatgatattactctcaatatcttaaacaccctgtaggtaagccctctgtgatattcctcataatatccagagggagaggatgatattactcccaatattgcatgaagtctacaccccacctgtgatattgttcctaatatccaggatgggagaggatgatattactcccaatgtcgcaggggatgtacaccttccctgtaatattgttcgtaatatctagaaaaggagaggataatattactttcaacatcgcagggggtgtacaccttccttgttatattgttgctaatatccagggaaaaagaagatgacattaccaccactattgcagaaggtgtacacccccccttgatatagttcctaatatccagaaaaggagaggagatattactccaaatattgcaagaggtgtacattcccctgtaatatttttcctaacattcaggaagaaagagagtgatattgcccttaatattgaagggagtgtgccccccccgtgatattgtttctaatatccaagaaatgaaaggatgatattactcccaatatcacaggggctgtacagccccctcccatgatattgttcccaacatcggggggggggtgaaatagtattattcccagtatcacaataggtgtacacacctgtcgtgatattgttcctaatacccatgggggaaaggacgatattattcttaatatctcagagggatgtacaccctccctgtgatattgttcctaatatccggggtgggagaggatgatattacccccaaaatctcaaagggtgtacacccctcttgtgatattgttcctaatatccagggtggagaggataatattattcccaatatccaggaaaggaaacgatgatgttactgtgaatattccagggggtgtcctcccctctgtgatattgttcctaatatccaggttggggagattatgatatttctccaaatatcacaaggggtgtacaccaaccctgtgttattgttcctaatatcgatggggggagaggacgatattactcccaatatcacagggggtgtacaccacctttatgatattgttcctaatatccatgaagaaagaggatgatattactttcaatatcgcaggggatgtacactccccctgtgatattgttagtaatacctaggagaagaaagtgtgatattactcccaatatcgcaggggatgtacacgcttcctgtgatattgttcctaatatttagggggaaaggggatgatattactcccaatatcgaatggtgtgtacacccccccgtgattctttttttttttttttttttttttttgagatggagtcttgctctgccgcccagactggcgtgcaatggcgcaatctcggctcactgcaacatttgcctcccaggttcgcacgattctcctgcctcagccttcggagtagctgggattataggcagctgtcaccataccaggctaatttttgtatttttagtagagttggggtttcaccatgttggtcaggctggtcttgaattcctgacctcaaataatccacccaccttggcctcccaaagtcctgggattacaggcataactttccctgtgatattcttcctaatattcaggaagaaagaggatgatattgctcccaatatcgcagagagtgtgcactcctcctgtgatatggttcttaatattcagaggaggagaggatgatattactttctatattgcagaaggtgtacacctccctcgtgatgtctttcctaatatccagtgggggagaggttattagtctcaaaatcacagaaggtgtaaacccccatttgatattgttcctaatattcaggggtggggagagaaaggtattactcctagtatttcagggcatgaacacccccaccgtgatatcattcctaatatccagaaggggaggcaatgatatttctcctaatatcacaaagggtgtacaccccttctgtgatattgtaaatattctgtgtgtacacccccctgtgttatagtctgtaatatccgggtgggggagagggtgatatttctccccatattgtaggggatgtacacccttctgtgatatggttcgttatatccagggaagaaaaaggtaatattgctgcccatattgtggagagtgtacacccccatgtaatatggttcgtaatatccaggagtggagagggtgatactgctccttacatcgaggaaggtgtacaccttattgttatatgattcgcaatatccaggggaggagagagtgatattgctccccatgtcgcagggggtgtaaaccctccgtgatatgattggtaatatccaggaaaggaaagggtgatatttctccccatatcgcgggggacgtacatcctcctgtgatatggttcgtaatatccaggaggaaagaggaaaatattgctcttcataacccgaggggtgtacaacccctgtgatatggttcgtaatacccagaagtgtacacccctctgtgatatggtttgtaatatccagggggttagagggtgatattgctccccatatcgcagtgggggtacacccccctggattggttcataatattcatggggggagaaatttacatttatcctcatatcagggggggtgtacaccccccgtgatatggttcgtaatatccaggggaagaaagggtgatattgctccttatatcgcggaaggatcaccctcccctgtgatatggttcataatacccagacgggaagagggtgatattgttcttcataaagcgaagggtgtacagccccctgtgatatggttcataatatgcaaaaggggagagggtgatattgctccccatatcacggagggtgtactcccttctttgatatggttcgtaatatccaggggtgtagatggtgatatagctcgccctattggggagggtgttcacccctctgtgatattgttcgtaatgtccagggaaagagaggatgatattactcccaatatcgcagaaggtttacaccactctgtgatattgttcataatatccagggaaggagaagacgatattactcccaatatggcagggggtgtagaactcctgtgatattgtttgtaatatccaggcaaggagaggatattactctcaatatcgcagaaggtttacacccctatgtgatactgttcatgatatccagggaaaaagaggatattactccctatatcacaaagggtgtacacccctttgtgatattttttgtaatatccaggggagagaggataatattactctcaatatcagaaggggtgaaaaccctcctgtgtcattgttcataatatttagggaaggagagagtgatattactccaaatatcacagtgggtgtacacccccctatgatattgttcctaatttccagaaggggagatatgatattattgccaatatcgcagaaggtgtacaccttactctgacattgtttgtaatatccagatggggaaatgatgatattactcctaatatcacagggggtgtacacccccttgttttattgtttgtaatattcaggggaagagacgattatattactcccaatatcgcagggtgtgtacaacactctatgatattgttcataatatccaggggaggagaggaagtgtacacccccccgtgatattgttcgtaatatccagaggtagagaggatgatattactcccaatattgcaggtggtgtacacctttctgtgatattgtcatgatattaagaaggggagaggatgatattactaacaatatcacaaaaactgtacactccctgtgatattgttcataatatccagaagaagggaggatgatattattctgaatctcgcagaagatatacaccaccctgtgatatggttcataatatcctaggggaaagaggatgacataactgtcaatatcgcagggggtgtacaattccctgtgatattgttcacaatattcagagggaaaaaggataatattactttcaatatcgcaggcggtgtacacattactgtgttattgtttataatatccggaatgagagaaaattttctcccaatatcacaggaggtgtacactcccctgtgatattgttcgtaatatccagggaggggagaggatactattactcccaacatctcagggagtgtaggccccccctttgatattgttcctaatattcggaagtggagaagatgatattacttccaaaatcgcagggggtgtacactccctctgtaatattgtttctaatattcatgagtggaaagaaagatattactcccagtattgcaggggacatacaccacactgtgatcttgttcacaatattcgggggggagaggatgatattactcccaatatcaaagtaggtgtacacccccttctgatattgatcgtaatatccagaattaaagatgataacgttactcccaatattgcagggggtgtacatttttgaatactgttcataatattaagagggggaggggatgatatctgtcccaatatcgcaaagtgtgtacacctcctgtgacattgtcccaaatatccagaggaaaaaaggatgttattactcttaatatctcagagagtgtacacctccctgtgatattgtttgtaacatccagaagaaagaggctgatattactcttaatatcgcagggggtgtacacccccgccccgggatattattcgtaatatccagggggaagtggaatgttcagaatgggagaggatgatattacttgcaatatcatagtgggtgtacaccccactgtgatattgtttgtaatatccgggaaaggagaaaatgacattcctccccatatggcaggggctgtacaccacctatcatattgttcaaaatatccagaaggggagaggatatgtctccaagtatcacagggggtgtacaccccgctgtaatattcttcctaatatccagggtgtgagaggataatagtactcccaatatcccagggcatgtacaccccccttgtgatgttgttcctaaaattcatggggagaaagaatattactcccaatatcacagggggtgtacatacactctgtaatattgttgccaatatgcagcaggagagaggatgatattactcccaatatcacaggggctgtacaccccgctgggatattgtttctaatatcaagggggaaaaaggatgatattactcccaatgtcgcagggtgtgtacttcctctttgtgacattgttcctaatatccaggagagaagagggtgacattccttccaaaactgaaaggggtgtacacaccctttgagatattgtctttaatatccagaacgaaacaggatgatataactcctaatactgcaggggggtacaccctctctgtgatactgtttctaatatccaggaggggaaagaaaaatattaatcccaatatcacagggggtgtacattccccctttaatattgttcctaatatccaggaagacacaggatgatactatttccagcagcacagggcatgtacacccctttgtgatattgttcctaatatccaggaaaagagaggatgatattactgtcaatattgcagggcgtatacactggttctgtgatattgtttctaatatccgggggtggagaaaatgatattactcccaatattccagcgggtgtacacccgttctatgatattgttcctaatatctgggggagagagaatgatattattgtcaatatcacaggggatgtacagattccctgtgatattgtttctaatattcacagggggagaagggtataatactcccgatatcgcagggggtgtacactccccctgtgaagttgttcctaatatccagggattgagagaatgatattactcccaatatcacaggcggtgtaaaccccctgtgtgatattgttcctaacatccagaggaaaagatgatgatattattttcaatatcacagggggtgtacgcatccctgtgatattgtttctaatatccaggggaggagaggatgatattattgttaatatcgcagggggtgtaccccaccctgtgatactgttcctaatatccggggtggaagaggataatattgctcccaatatcgcaaagggtgtacaaccttcctgagatattggtcctaatatccagggagggagaggatgatattactttcaatatcacagggagtttacacaacccctgcgatattgttcctaatatccagcggaagaagagttaggataatactattttcaaaattgctgggtctgtaccccctccccgtgatattgtttctaatatccaggaggggagaaagtaatatgactcccaatatcttagaagatgtacaccctccccataatattatttcttacatccagggggtagaggatgattttgctttcaatatcacagagggagtaaacctttccggtgatattgtttttaatatttaaaaagagagaagataaaattactcccaatacaaaggggatgtattgtgtactcccccctctgatattcttttttaatatccagatggagagaggatgatattactttcaatattgcatgggatgtataaatcccctgtgttattgttctgaatatacaggtggggagagtatgatattactccaaatatcgcagggggttctttccccctgtgatattgttcctaacattcagggagggagaggatgatattactcttaatattgcagggggtgtacccacgcctatgatattgttcctaatatccagagggggagaggatgatctaactcagaatatgacaaggggtgtacacacagcctgtgatatggttcctaatatacaggggagaaggggataatatttctcccaatatcgcagggggtgtacaaccccctgtgatactgttcctaatatacagaaggggacagcatgatattgttcctaatatcgcaggaggtgtacaacgccctgtgatattgttcctaatatccagggcgggagaggatgatattaccctcaatatcgcagggggtgtgcactttccctgttatattgttcctatgatccgggtggggggaaatgacattagtcccaatatcgcaggatgtgtgcaccgctcccccgtgatattgttcctaatatcaagggggagagaggaggatattactcccaatatcgcaagggatgtacatcctccatgcgatattgttcgtaatattcaggaggagagaggatgatattactcttaatatcgcagaaagtggacacccaccctgtgatgttcttcataatatccagggaagcagacgattatatgactttcaatatcgctgggagtgtacatcccttttgggatattgtttctaatatccaggaagggagaggattatattactctcagtattgcaggcagtgtacaccttttttgtgatattgttcctaatattcagaaagggaaaggatgatattactcccaatattgcaggtggtgtatatccccctctgatattgttccttatatcaaggaagagaaagaataatattactcccaatatcaaagacagtgtagacccctcctgtgatattgtatttaatatccatggggaaagaggatgatgttactcccaatatcgcagggggtttacacccacactgtgatattattcctaaaatccagtggaggagaaaataatattgctcccaatattgcagggtgtatacaggccctcccccgttatattgctcctaatatccagcggtggagaggatattactttcaatttgtgtagggagtgtatacccccctgtgatatttttctaatatcaaggatgggaaaggatgacattactcccaatatcgcaggaggtgtacacgccctgtgatattgttcctaatatctagggaaggagaggatgatattactttcaatattgcaggagctgtacaccctctgtggtattgttcttaatatttaggttgggagaaaatgatatgagtccaaatatcgcagaaggcatacacacttccaataacattgttcttaatatccgggggagagggtgatattactcccaaaatctctggggggtgtacacccccttctgatatttttcctaatatccagggaaggaaacgatgatattactataaatattccaaggagtgtacaccttcctaatatcctaatattgttcctaatatccaggggtgggagaggattatattactcccgatatcgcagtgggtgtacacccctcctgtgatattgtttctaatatccaagctaggagaaaatgatatcactctcaataccacagggggtgtacaccttccgcatcatattgttcctaatattcagagggaaagaagatgaagttactttcaatatcggaggggttgtacacaacccctgtgatattgctgctagtatccaggaagaaaggggattatgttactccccttatagcagggggtatacacctcccctgtaatattgttcctaatatcaaggctgggatatacgtggggggaaggatgatattactcccaatatcgcaggggttatacaaccttctgtgatattgctcctagtaaccagggcagaagaagatgatattactcctaatatcgcaggaggtgtacactcccccattatgttgttcccaatatgcagaaaaggagaggatgacattattgccagtatcgcagggtgtgtacaccacccctgtaatattgttccaaatatttagggggagagaggatgatattactcccaacatcgcagggggtgtacacacatcccctgtaatatagttcttaaaatctaggggaaaaggggatcttatttctctaaatattgcagagggtgtacactccccggtgatattgttcctaatagccgggagggagataattaaattactttcaatatctcagagagtgtacatcgcccttgcgatattgttcctaatatccagagcaaaagagaatgatattactcccaatatcttaggagtgtacatttaacctgtaatattgttcctaatatccagggggaagagaatagtattactgccaatatcgtaggggttgtacaccttttctgtgatattgttgcaaatatttagtagagggaaagaatattactcgcaatatcacagggaatgtatacttcccctgtgatattgttctgatatccagaaaaagagagggtaatattactcccaatattgcagggggtgtacaccccccttgtgatattgatcctaatataaaggaaggaagaggatattactcctcatatagaaggggttgtccaccccccttgtgatattattcctaatattcagggaagcagaggatgatattattttcaatatcacagagggtgtgcagtccacctgtgatattgttcttaatattcggggggagaggatgttattatgcctgatatcgcagtagaggtacacccctcaagtgatactgttcctaataaccaggggtgaagaggatgatattactcccaatatcgcaggtggtgtacacccccccatgatggtttctaatatacagagggggagaggaaaatattactcccaaaatcgctggaggtctacaccccccttgtgatattgttcctaatatccaggaaaggaaacgatgatattactgtgaatattccagggggtgtacacccgctttgtaatattgttcctcatatccagggtgtggagaggattatattactcccagtatcgcagggggtgcacgacgcccctgtgatattgtttttcatatccaggaggggagattattatcaatatggcaaggggtgaacaccccctgtgatattgtacttaatagttaggttggcagaaaatgatattagtctcgatatcgcagggggtgtgcactccgcctggtgatattgcttttaatatcaagggggagaaaatggcattactcccaatatcgcagggggtgtacaccgctcatgtgatattgttcctaatatccaggtggagagaacataatattactcccaatatcgcacaaggtgtacacccctcctgtgatatggttcctaatatccatgggaggagatgatgatattactcccaatatcacaggggatgtacaccacccttgtgatattgttcctaatatccagggaagaaaacgatgatattattgtgaatattacagggagtgtacacactccctgtgatattgtttttgatatacagggtgggagaggatgatattactcccaatatcacataaggtgtacaccccccgtgatattgttctaaatatttcggtggggagaaaatgatattagtctccatatcacagggggtgtgtgctcctcaggtgatattgtttttaatatcaagagggggaggagattatattactttcattatcacagggggtgtacacccctcctgtgatattgttccttatatccaggcgaggggaaaataatattactctcaatatcgcaggaggtgtacacaccccatgtgatattgttcctaatattaagggggaaagaagataatattactttcaatatcacagggtttgtactcctttcttgtgatatagtttttagtatccagggggaaagagcatgatattactcccattgtagcaaggggtgtacacacctcctgtgatattgttcctaatatccagaagtggtgaggatgatattactcccaatatcgcagggggtatacaccccacctatgatattatttctaatatccatgggaaaagagtatgatattacacccaatgtcgcagagggtgtgtatttttcctgtgatattgtttctaatattcaggcggggagaagatgatattactctcaatatagcagaaattgtacatccccgctgtgatattcttcataataatcagggaaaaagaggatgatattactaccaatattgcaggggggttacacttcccctatggtagtgttcctaatatccaggaagaaagaggatgatattaatcccattatccaggaagtgtacacccaccctgtcatgttgttcctaatatccagcagggaagaggatgatattacaccccccccccgtgatattctccttaatatccaggaggggagaggctgatattactggatatatagcaggggtgttcataccttctgtgatattgttcctaatatccagaaaaggagaggatgatattacttccaatatcgcagaaggtgtacacctccctgtgatattgatcctgacattcagaaggggagaggatgatattactcaaaataccgcagggcatgtgcattcccttgtgatattgttcctaatacccagaagggaacaggataatattactttcaatatcgcagggagtgcacacccccctttggtatggttcttaatatccagaaggaaagagggtgctattactttccatattgcaaggggtgtacaccccactgtggtatggttcataatatccaggcagggagagggtgctattactccccacagtgcggggcatgtacaccctgctgcggtacggttcctaatatccagggggagagaggatgctatgactccctatatcgcggggtgtgtacacccctgtgtggtatgttttgtattctccaggaacggagagggtgttgttacccctcatatcgctggaaatgtacactcccctgtggtatggttcgtaatatccaggggattgagggtactgttacccccatactccccatatcgtggggggagtgcacctccctgtggtatggttcgaaatatccagggtaagagagggtgctattattccccattttgcaggaggcgtacacccccctatggtatggttcgtaatatccggggtgaggggatgctatcaaaagaagagagaaagagaccccccatattgttctatattattttatactcagtacctgttttaagaagaaacaaggaagtgaaaccaaaagcaggcagcccggcgccaggcaccagacccaaaaccagacccgaaaccaggcctgggcctgcctgaccttagcctgatagttaaaattcaacccatgacctagcaaccaatgttatccatagattccagacattgtatggaaggacattgtgaaatttcttgttctgtgctgtttcactctgattaccggtgcctgcagcccctgtcacatacccactagattgctcaatcaatcatggccctttcatgtaagatctttagtgttgtgagcccttaaaaaggacagaaattgtgcactcaacaagctcggattttgagacgctagtctttcgatgcttccagctgattaaaagccacttccttcactacctcggtgtctgtggggttttgtccgcgactcctcctgctacactatgactccccatatcaaggggggtgtacacccccctgtggttcgtaatatccagcaggggaaaaggtgctattactccccatattgcagggagtgtacacccccttgtagtatggatcgtaaaatcaaggggggagggaaggtgtaattatccccatatctcagggggtgtacacccctttgtggtaaagtttgtaatatccagggatattacagggatattatccccaaattaatacttttataatttcttatgcctgcctttactgcaatctctgaacataaattgtgaagatttcatggacatttatcacttccccaatcaatacttttataatttcctatgcctgtctttactttaatctcttaatctcatcatctttgtgagctgaggatgtatgtcgcctcaggaccctgtgatgattgcattaactccacaaattgtttataaaacatgtgtatttgaacaatatgaaatctgggcaccctgaaaaagaacaggataagagcgatgttcagcgaacaagggagataagcataaggtctgactgcctgtggggctgggcagaacagagtcacatttttcttattgcagaaaatgagtaggagaaatatcactgggaagggaacgcattcctaggggaggcctatggacggccgctctgggggtgtatcccttatgtggttgaagataagggatgaaatacaccctggtcccctgcagtgccctcaggcttgctaggattagaaattccagcctggcgaattctagtcagaccagttctctgctcttgaaccccgtttcctgttaagatgtttatcaatgacaatgcgtgcacagcaggacatggaacctcaatagtaattccattttctccctggccttgtgaccttgctaggcccttctgcccttgtgatcttttattgccatttgaagcatgtgatctctgtgacccactccctattcgtatccccctccccttttgaagtccctaataaaaacttgctggttttgcagatcaggtggtcatcacagaacctgccgatatgtgatgtcaccccggaggctcagctgtaaaatttctctttcgtactctttcactttatttctcagaccaggtgacacttaaggaaaatagaaaagaacctactttgaaatattgggggctagttcccccaatagacattgttcctaatatccagaaaaaaagaagatgatattactcccaatatcacaggggttgtgaaccccacctgtgatatggttcctaatatccaggaagggagagaatgatattactctccatattgcagggggtgtgcacatccctgtgatattgttcctaatatccaggggaggagagggtgatattactcccaatattgcaagggttgtaaactccaccctgtaatattgctcctaatatttaggatttagggggggagaggataatattactcccaatatcgcaggggatgtatatgccctctttgatattgttcctaatatccagggggggagaggataatattactttccatatcacaaagagtgttcacccccctgtgatattgttcctaatatccaaaaaggaagaggatgatatcaatcccaatatcacaggaagtgtacaccccccccttttatattgtttctaatatccaggggaaatgagggtgatatttctctcaatatagcagaatgggtacactccccctgggatattattcctaatatccaggggaaaaaaagaggttgatattcttcccagtatagcagggaatgaatacaccctttgtgatattgcttctaatatcaaggggaaaagaggatgatatgactcccaatatcacaggggatgtaaacctgtggcgttgttgctaatatcaaggagggaagagtatgatattactcctaatgtcgccgaaggtgcacactttccctgtgatattgttcctaatatccaaaagggaagagaatgatattacccccagtattgcagggtgtacaccacccctgtgatattgctcctaatacccaggaaaaaagagaatgctattacccccaatatctaaggggacgtataccttccctgtgatattgtttctaatatccaagtggggagaggatggttttactctcaatattgcagggagtgtacactccccctgtgatactgtttctaatactcgggctgggagaaatagtattactcccaatatcgcagtgatattgtttccctgtgatattgtttctaatatctagtgggggagataattatattactaccccatacacaggggagggtgtacattcccctgtgatattgtttgtaatatccagggaaggagaggatgttactcccaatatcacaggggttgtacaccccttttttgatattgttcctaatatctggggggcagagaattatattactgtcaatatcacagagtgtgtacaccccctctgttatattactctttatattcagggcggtagaggatgatattactccctatatcacagggggtgttcacccctcctgtgatattgtttataatatctaaggggaaagaggatgatatcactctcaatatcaaaggaaatgtacacctttcctgtgatattgtttttattatataggggggcagaggatgatattaagaacaataccacaggggatgtacacccacgtattgatattgtccctaatatgtatggggaaagaggacagtgtaactcccgatatcgcagagtgtgtacacccccttgtgatattgtttctgatatacacggggagaaaagataatatttcttccaaaattgcagggggtgtacaaccccctgtgatattgtttttaatatccagtgggggagagaatattactcccaatattgcagggcgtgtacacaacccctgtgatattgttcctaatatccagagtaggggaggatgacattactttcaatatcgcaaggggtgtacattcccctgtgatattgctcctaatatccatgaggggagaggatgatattattcctaatatggcaggggctgtacaccttccctgtgatattgtttctaacatccagtgggggagaaaatgatattactccctatatcacagaaggtgtacactttccctgtgatattgttcctaatatccagaaggggagaggataatattactcccaatatcgcaggaagcttacaactcccctgtgatattgtttctaatatccagggaggtagggatgatattactcccaatatcgcaggggatgtacactcccccgtgacattgtttctaataaccagggggtgagaggatgatattacgcttaataccgaagggggtgtacacacccttgtgatattgtgcctaatagccagggggaagaaaattatattaattttaatatttatggggaaaaaggatgatattactcccaatatcacaggggctgtacaccgaccttttgatattgtttttaatatccagaagagaagaggataatattgctcccaatatcagaaaaggtgtaaaccccttctgtgatattggtcctaatatccagggagggagagaataatattactaccaatatcacagaaggtgcccacccccaaggtgatattgctcctaatatccaaagataatagggtgatgttactcccaatatcacaggaggtgttcacaccccttgtgatattgtttctaacgtacagggaagggagaggatgatattattcccaatatcacaggaggtgtatactcctctgtgatattgattttaatattcggggggaaaggatgatattactccctatatcgcagagggtgtacaccctctgtaatattgatcctaatatccagggcgggataggatgatattactcccaatatcgcagaaagtctacacaacccccagtaatattgtttttactatccagggggaagaggatgacattactcccaatttcacagagtgtgtacactcaccatttgatattgtttctaatatctagggggagagaatatattactcccaatatcacaggaattgtacaccacctctgtgacattcttgtgaatatccggggaaaaagagaataatattactcccaatattgcagagcgtgtacacccctccatgatatcgatactaatatttttttaaagaggatgatattactcccattgtcacaggatgtgtacaccccccttgtgaaattgttcataatattctggggggagagcataatattactccccatatcgaaaaaggtgtccaccctccttataatatggttcctaatatccaggatattacttaatccaggatacttgtaataccctaaatatacaattgcttgaacctccacctcccaggttcaagcaattcttctgcctcagcctcccgagtagctgggactacaggggcacaccaccacacccagctaatttttttttcttgtatttttagtagagatggggttttgccatattggccaggctggtctcaaactcctgaccttgtgatctgcccacctcagcctcccaaagtgctgggattataggcgtgacccaccgtgccaagccaggaagaggatgctctatagatttccccaataagagatggctttgcagggccattccaaaatatgtcaaagaaatacatttggggataaaatactttgatttcctttagggaatgttatctattatgtgatgctataccagagtcaggttggagtcggttatcttattgcaacaaagagtctgttccgtcactgttgggatctctattttttcctcttatttcttgagacagggtctcactctgtcacccagtctggagtgcagtggtgcgatcttcattcactgaaacctctgcctcctgtgttcaggtgattctcgtgcctcagccccttaagtaactaggattacaggtgtgcgccaccacacccagctaatttttgtattttcagtagagatggtattttgccctgttggccaggctggtcttgaactcctggcctcgtgtcatctgcccacctcgacctcccaaagtgctgggactgcaaatgtgagctattgtgcccagccaggatctctgttttaatgttagtgctggtcactttgcatgaactccaaagggaagaaatataatgaggtgtgtctgaccccctgccttctcatcgtgacctgaattagtttttcaggtttgcaggggatacccttggacaagaaggggctctattcggttggttggggggattagaattttactttttgtttacaatatttctcctgaaagagttaggggctcacaaggaatttccgcgtgagcaacttatgaggaaagccatctgggaagatatgtgtccttgtgtcactgggatattctcgtttaccccaatgatacggcaatgacgcagggttgtgaaattacagctatgtgtttggggaaaaaagaaagcaggattgtgtgactacgtttccaaacttcacttgcccttagccatagtgagttgggggcctggagattctgttttctttcacaatgatatagatacaattaaatgtatagaaagcaaaaaaataaaaaggtgagtaatgaggaacctctgattcctgagtggccatgtagttacccatggcacagagccacagttactgaaggtaaagtttgctggggaatttagaaatgaatccagctcttggaggagtcagtttactggatgcctaagaaaatgcaaacaaaataagaaaaaagggtaatattcaatcccatagttattgttacctgtcatagctaaagtaaaattaaaacagagtgctggcttcaatcttgatgctacactaagcttagatttcagtgaatgtgagtctcagccactagctcagagccacctcccaaagaccaaatcatgtagggacaatagaaagtacttctgagaattgtggttaccaagaacctagtaactgttggggaggagcaaaacaaagtacagaaaccagagggtacaatctgagtgagactgctatcagcttctggaggagcctttactaaaatgaatgatgagagtaactggatgatgagagtaactaatggatgatgagagtaagcaatgtctttggttttcttttttttttttttttttttttagcagacgtctcactcttgtcgcccaggctggagtgtaatggcatgatctcgcctcactgcaacctccacctcctgggttcaagcaattctcctgtctcagcctcccgagtagctgggactacaggcactcatcaccacacctggctaatttttgtatttttagtattttctggtgagggtccaggtttccggaaacaactcagagacatatgttaagatgttatctttagttttcacagggaaccaaatatgttacgactccaatttccttggctattgttttaagttaccattaccttctcgttgatcaagttgctcatttacttctcaagcctagctagatgcctggaatttcccttgaaggaagtcaagattttcctttatctccatactggctgatggtgatcgagtaagcccctaagaggggtccctgctccatctcgagatgctgctagattctacagtgcctaataaacagctctcgcctggccgacaaagagctgcttgctctctggatagcaattccaaagtgaacagacaacatcctgtttggaagactgccactctgttagaagaagcatcaggaaaacctttcttttgagctatttataactaacagcaattgaccaagtatacttttgtgagtgaaactgacctttctccctgtaagaattctccaaaatttggaaactatttgtgagtatttttacttatggcaatataattattggcacaagctcaatcagattcggttttctttcgtaacaggaaccattggagatactcattactctttgaaggcttacagtggaatgaattcaaatacgacttatttgaggaattgaagttgactttatggagctgataagaatcttcttggagaaaaaaagactgggtatattttcaatatgctttccttttaaggtccctcacctgtggaaagtaaagaatgtcactttctgacaggctcaggaacctcaagttatgtagggatctcaagaagatgggggaattcacccagttcatacaggtgaaattgctgttgcaaagattatgaatatgagagaagtccagcatggctgacttcatctcgtgtctggcctcaggctggctgcccttgctcactcttgggcataggccaagctagccatgggaggaatttagtttatagtttaactttgaagcacggatgataatagtctctccctaaaatgaaccccttccttgctcagggactgaaactacctttgtatgacaaatgaaagcccacaagattaagattatgagaggggcctgaattctgctaaaatgcaggtgtagctgactgataacaagtcattgtcccacagcttgcctttctataatctcttgcttctcaggagtcacatggccagaggtcctgagatttccagtcctgtgacccccacccagagatggacttagtgcatgaggaccattttccacacccctatgatttcatcctcaaacaatcagcagcaaccattccctagccccctgccttccaaattatccataaaaatcctagcctctgagttattagggagattgattaataatcccagtcctaccccttgggttgctctgatttaattaaaccttctctactgcaataccacggactcagtaaattggttttgtctgtgcaatgggcaagaagaacatgttgcatggttatacaggtactacaagcacagtctgatggcaaattattggttttgcttcctgcccttgatgtttctaaacatctagtccaaaattacttgtgaaaggtccagcaaagccaattttaaaagaggctatatggccaatcactattctttctacacattattgcaaataatcaggccacggctgggcacggtggctcatgcctgcaatcccagcactttgggaggctgaggcaggatcacctgaaatcaggagttcaagaccagcctaggcaacatgataaaaccctgtctctactaaaaatacaaaattagccaggcatggtggcatgcacctgtaatcccagctacttgggagactgagggaggagaatcacttgaacctgggaggcagagattgcagtgagctgagatcacaccactgcactccagcctgggcaatagagtgagactttgtctcaaataataataataataatcagaccaagtataatgaaattaaaatttattttgcaaataaattggtcctactacaatttatccttcatagaaatgtggaaactgaagataaaaaaaattaggtttcagaagaaaactatactacacctgttattagattctagccctaaacattgtttttgaggtttttattatttacctgcaatttggtctaaattctgaattatttcctgactacaagtatccaaggaataaatgggttttctttttctttatgatagttttagttggcttctaatgcaacaacaatttttattgtaatcctgtgtgcattctattcctactattcaaattattaatgttatagatctttcattgtagtacttctgaattaaccaaaatcacagtattctgaagatgattctacaaagcctgctgtttctacaaaggctgctgatgatttctacaaagcctgctgtagtgttgctgtggcctctgcttaaaaaagtagaaaacacattgatgcagcatgttcaccccaacctccctgcctaaaggctcagggaccatcttggaagaggaaggcgcgtgagattgtaagagccgaattagggggatggagtgtggagaataaggacacttcatcttggatgctcacctgccaaattgacttctgatgaaagccagctccagaaatgtgcctacagttactactttcacctaaaccctgcccttagtcaaatccttctcttcttctaagcaatcaacttcaattccttgtataacccacagtataaaagggcttttataccattctatcctattgcatgtaagccttgggtctgggaggtaacagtgtgggattccaccatctcatctccctgccacccaaacatgcctgctcttctttaagcaatattaaatgtttgtacttcagaaatttgatttgtcagcctcttcttcagactctcagcttctttggcctttgggagtaaatttgcataggcctgctcaaaacaggatgttctgggggtttgggggtgttgttttgttttgttttttgttttgtttagagacagggtctcactctgtcacccaggttggagtgcagtggtgcaatcatggcacactgcagcctcaaactcctaggctcaagcaatccccccaccttggcctcccaaagttctgggattacaagcataagccaccatgcccagccctggacttttctttaaagacatttacacagtgtaggaattactgtgggtgcactgctcaggtccccttctccaggatgctcattcctacctcatagatgattttcctgcagagatttgacctcagctgaagggcagtcacctggtccaggtggttgctattcacctccttcctgagaacagccaacagccagggacacgctagcacagagatataagagcgaccaaggtgaggccccttctgtgctgcggtgcatgctccagagcctccctgggatcagacttaagagggtctccagccagatctggtcttcgctgctttcctcgagctccccagcgcactcctgcaatgcatcttttttttttttttttttttttttgagacggagtttcactcttgttgcccaggctggaatgcaatggcgcaatctcagctcaccacaacctctgcctcgcgggttcaagtgattctccttcctcagcctcccaagtacctgggattacaggcatgcaccaccacgcccagctaattttgtatttttagtagaaacgggtttctccatgttggtcaggctggtttcgaactcctgacctcagttgatcctcctgcctcagccttccaaagtgctgggattacaggtgtgagccactgtgcctggcccaatgcacctcttgaatcacctcctcatgctttgcttttagagaacatgatccccaacatgtgattccagcaaagattctagaaagccaaccgtgacaatcacttctgggtttagatgacccccccccaccacaagatggcagtgagcacctcatcacagaggtgctgatggtctgcagcaccgcgccaggccagaacgtgccttttacagaagaaaataacccagtagctgactaggatggtgaggagggctggtgagcactgcggtagtgagagggacactagcatcactgagatgcaagtgatggtcatttttcataggtcaaagctcaaagcaggggacagttacagggcagggcttcatagcaccagtgtgatgaaagtatctgggagtggctaaggccagcactatgccatgggaagcaaggtgggcctgaggaggaggcagcagcgtcagcctgcaacaagtgggggctgccctgcagagacctaagagtcatgttatagagcacagtgtctgtaaggccaagaagtgtggacagccaagtgtgtcaattactagacatactcaagaggagcaggaagggcagggcatggtggctcatgcctgtaatcccagctacttgggagactgaggaaggagaatcgcttgaacccgggaggtgaaaattgcaatgagccgagatttcgccactgcactccagcctgtgtgatgggagcgggactccatctcaaaacaaaaaaagaaaaaggaaaaagaaaaaaagaaaaacctaggtatacttctcaagcaaataaaaataatcaaaaccaatatcatgcccgggcacaaatttcatatatataacagatttaaatatatgagggtgattatcctctcatatctccatttttttttgtttttccatttttttctttactaaaaaaagttaatgccaatgacacacaatttttttttttttttttttttttgagatggagtctcacttcttcgccctggctggagtgcaatggcgtgatctcgactcactgcaaagtctgcctcctgggttcaagcaattctcctgcctcagcctcccaagtagctgggaccacaggagtgagccaccacacccagctaatttttgtatttttaatagagacggggtttcaccatattggccaggctggtctcaaactcctgatctcaaataatctgcccgcctcggcctcccaagattctgggattataggcgttgagccactgcgccccgcctatgtatgattttttttttaattttattttcataagtttttggggaacaggtggtattttgttacatgagtaatttctttagttgtgatttgtgagattttggttcacccatcaactgagaagtatacactgaacccaatttgtggtcttttatccctcacccccttcccaccctttcccccggagtccctgaagtccattgtatcattcttatgcctttgcatcttcatagcttagctcttgaacccttactttctgtttgagggagaagacatatcatctacaagtagatactgtgtaaacattccattgcatgactatcccataacttatttattatttgtgtttggttatttgctgctatgtaacaaccccactcccaactaaatggtgtgacaattccatgattctgtggatcaaaaattctgaaaagtcaaacccaaggagttttgtctctgctccatgatgctaaagcctccgcaggggtgaggcgaatggctcagggtgactgaaaagctcagggttggaacagctggggatgaggcctctatgtataagatgattcttcactcacaggtctgaaactatggtggggacagccagaaggctcggctcagctgggacagtcacctgagccctacacatgacctctccaacatggtgatcctgaagcagttgggtttcttacacagcatcacacttttcttttttttttttttttttgagatgaaatattgctctatcacccaggctggagtgcagtggcacgatctcagctcactgcagcctccgcctaccaggttcaagcgattctcctgctccagcctcccaagttgctgggattgcaggcgcctgccaccaagcccagctaatttttgtatttttagtagagacggggtttcaccttgttggccaggctagtcttgacctcttgacctcaggcgatccgcctgcctcggcctcccaaagtgctgggattacaggcatgagccaccgcgcccggccaaagctcacacttcttatgattcagccttagatgtcacatcagttcattttccccacacttattagtgttagaagtcacaagcccacccatactcaggggactggcacacagaccccactctcaatggaaggggtgggacaccaccattcctgctgatgggcatttgggtaacttcctgtttgaagctattaagattgggctgctgtggccgggcgcagtggctcacgcctctaatcccagcactttgggaggccgaggcgggcggatcacgaagtcaggagatcgagaccatcctggctaacacggtgaaaccccgtctttactaaaaataccaaaaaaaaaaaaaattagctgggcatggtagcgggcgcctgtagtcccagctactcgggaggctgaggcaggagaacggcgtgaacccgggaggcggagcttgcagtgagccgagattgtgccactgcactccagcctaggcgacagagcaagactccgtctccaaaaaaaaaaaaaaagattgggctgctgtgactattctagtaggtgtctttggtgagcgcctacacgtgtttctctttttctctttagtatatgcccaggaggggaactgctggctcccagataccgtatgttcagggtcacacacacttccacagggttttccaaagcccttgtaccagcacgcactcccagcacctgtgtgactgctccagctgtcccacagtctcatcagttctattgctgatattttcattttagcttaagttatatttaataggaaaattaccgttgcctctgccccccgttcctgcctgtaggagtttctcgtagctgttgctacaggtggccacaaatctgtcacttaaacccacacaaattgatgtccttatggctttggagtcagaagtgtcaactgaaggtactagcagggctgtactgacctggtggcctcagggagcatctgtgctgcttctccaccttctagaggctgctgcatccctcgctccagccccttcctgacaccactcaccctcctacttctgttatcacatcctcaccttctctgtgttcagggctccctctgtctctctcttgcaagcacacttgggattccattgagggccacccacataacccaggagaatttctccacctcaatatccttaacaactgcagagcccttttgccataaaagttaccattcacgggttccagggattgtgacatgggtagctttaggagtgattattcctgcctgtctcccgctcaccagaacttggactttctctctcaacaggagccccctgtgtgggaatagcctgtctcaacgacgccctctataaggacctgcttcctcaaaggacctcatagtcgggtcctgcccctcagtgtccagtctgccttggctggaggggctgcaggggtgtgttggcgccacctggtggagacagggcatcacagcaggtgggagcccagtagaagcacaaccaaaacatgggtaatgtttaaaattttctggctaagcgctgtggctcacgcctgtaattccagcactttgggaggccgaggtgggtggatcacatgaggacgggagtttgagaccagcctggccaacatggtgaaacatcccctctactaaaaaatacagaaaaattagctggacatgtggcgcgctcctgtaatcccagctactcgagaggctgagacacgagaatcgcttcaaccccggaggggttgccgagatcgcgccactgcactccaggctgggcgatagagcgagactctgtctcaaaaaaaaaaaaagaagaggggaggcgaggggaggggaggggaaaagggggaatttgtttggagctgagacatccatcttctcctgacctcagatatttgcactcctggttatgaagccttcacacttggactgaatacaccaccagctttcccgatttccagcgtgcaaatggcagatcgtgagacttctcagcttccataattacatgagccaatttatatatataaattgggtcctccagaaaaacagaataaattatatatataattatacgcataacttaattaaattatacgtataacttagctatatatataatttattctgtttttctgaagaaccctactgacacaaatgttgagcatcttttcatgtgcttattggcttaataacttgtacatcttctttggggaaatgtctattcaagttctttgcccattttgtaactgaactattaatatttgtctttacattgttgagttgtaaaagttccttatatattctagatactagagccttatcagatatatttctgcaactattttctcctaatatataggttgtgtttttattttctttttctttttttttttattgagacagtctcactctgtcacccaggctggagtgcagtggcatgatcttggctcactgcagactcgacctgccaggctcaagcaattctcccacttcagcctcctgagtagctgaggttataggcacttgccatcgcacccagctaatttttgtattttttagtagagccgaggtttcgccatgttgcctaggttggtcttgaactccctgcctcaaagcgatctgtcagcctcagtctccctaagtgctggaagtacaggtgtgagccacagtgcccggccatctattttcaatagtgttttttgatgtacacaggtttggaattttgataatgttcaattcatccatttttttttttttttttttggttctttctactggaccaccactcttgagccctctaatccaacctccacgcggcagccagagggagctctctaaatgtaattactctttccctgctccacctgctcaaaacagtgtcacatttgtgatttaaaacagtatttctcaaacctaatttgcaaacaaagcaggtggaactcttcttgtatgcacagcatctgatttggttggtctggcatgggtctgggagtgagcacacctaccaagcggctgctggggtaacttgcgttttccactgatgatttcagcaatgtttccggtcccacatgctcctccagaaccttgtactcccccatgaaaaggtggagtccatttccccttcctttatttatttttttgagacgaagtttcactcttgttgcccaggctggagcgcaatggcgtgatctcagctcaccgcaacctccgcctcctgggttcaagcaatgcttctacctcagcctcccgagtagctgggattacaggtatgtgccaccacgcccagctaattttgtatttttagtagagacggggtttctccatgtcggccaggctggtctcaaactcccgacctcaggtgatccgcccgcctcagcctcccaaagtgctgggattacaggcgggagccaccgcgcccggctatttccccttcctttgaacctgatcaggacttgacgatggcatcaacatggtgagagtgaccctgcatggcttatgaggctgggttacacaaggcgatgttgcttctgactggctccctctcaggatacatgcccttggaacccatcctctaagctccttgggagcccaacttagcccatgtggagacaagacagggagagaaacagaggcacccccagccctcagccagcatcaaccgccagacaggagagcaaatgcgccaacaatgattccagctgaagcctcagacagcgtggagcagagatgagggatccctgcagattgcagatgcgtgagcaaaatgcatgctgtcactgttttgaaacaacaatgtctgggggctgtttgttatgcagcaatagacagctgtaacaatgctgttactgctgtattccatgaatgactgcactttgagtagcagggggctagatcactagataagccccatggcttctgtgtatgctatttttctacttttatatccttttcattcactttttttttttttttttttgagacagagtctcactctgttgcccaggtgggagtgcagtggtgcaatcttggcggactgcaacctccacttcccgggttcaagcaattattgtgcctcagcctcctgagtagctgcgactatagatgcacccccatgcctggctagtttccgtatttttagtagagacggggttttgccatgttggccaggctgatctcagactcctgacctcaggtgatccacccaccttggcctcccaaagtgctgggattacaggcgtgaaccactgcacccagcctcattcactttctttacttggctcatttttccttgttgcctcaattctcctctaagatcactttcctgacatttcagcctgggcctgttgccttctctgggtcccctccgcctcctgtgcctcccccatctcagccttgatccctcagattatacttcctctgtccccaccctgaccatcttggctgtccctggatagggatgggtatcttctcccactggtctgggagatctggaaggacaggcctggaaaagacttggtcactgctggaaggagctcagttagtgtggtgctgaggacagtacgggtgaggctggccccttcacccaaactcccactctcttccatagatttcacctctgtggcccaggccataggattagggcaactccccttaaacatcgagtccatcctccaagctgtccttttttttttttttttttttttttttgagacagagtctcgctctgttgcccaggctggagtgcagtggcgcgatctcggctcactgcaagctccacctccagggttcactccattctcctgcctcagcctcccgagtagctgggactacaggagcctgccaccacacccggctaattttttgtatttttagttgagacggggtttcaccgtgttagtcaggatggtctcgatctcctgacctcgtgatccgcccgcctcggcctcccaaagtgctgggattacaggcgtgagccatcgcgcccggcctcatgctgttcttgaatagtgagcacctgttacaagtcgccccaccagcctctcacttgtacccccctcatctctttctccccaagagacagaggaccctggcacttgtgaagcatgacccagaccctggggccatggcatccaacatcctcattccccatgacccctactgtctagatgtagctgccaagagacccccagactccccgggcctctgtctagagtgccaagacagagagagaatgccctgccgcttgcatgctttgtggggtgtccttcccccttccctggctgctaggcgtgacttcaacgttctccccaacccccaaacagcagcactgacaccagctgcagacctggctcaggttagctaatgaggaccaggctggggatggagcctgaacccctaaaccccagtcctgtaccccaccctaatcctggggtctccactggacaaaacgaagcagcttggtttttcgttgttattgtttttgagatagagtatctctctgtctcccaggttggagtgcagtggcgtgatctcagctcactgcagcctccgcctcccgggttcaagtgattcttgtgccgcagcctccccagtagctgggattacaggcgcgtgccaccacacccagctaatttttgtatttttagtagagacagggtttcaccatgttggccaggctggtctgaaactcctgacctcaagtgatttcccagcctcggcctcccaaagtggaagcggcttatttttaaggagaaaactcccgtggaaaggaatcagcacctcctctgtcaacatttcacttctctgaaaagactctcacttccaacagaaagtgctttgtaacacaacaatgaggctgggcgaggtggctcatgcctgtaatcccagcactttgggaagctgaggcgagtggatcacgaggtcagaagttcgagaccagcctgaccaatatggtgaaaccccgtctctactaaaaatacaaaaattagttccgtgtggtggcgtgagcctgtaatcccagctactcaggaggctgaggcaggagaatggcttgaacccaggagatggaggttgcaatgagccgagatcacgccactgcactccagcctgggcaacagagtgagactccgtctcaaaaaaaaaaaaaaaagaatgagaacatatggacacagggaggggaacaatacacacaaacaaaatttagaaacaggtgaaaataattttagtaatatttttactaatactgatatgctcaaaatattattatttcaataagtaatctaaaaattattgagatgtcttatgttcttttcatcatactaagcctttaatatttggtgtgtattttacactcacagcacatctcaatttgcagtccccatgtttcaagcactaaataaccatgtgtgtccggtggctaccatactggacagcgttgatctgaaatcgcatctgtatgcatcaccagcatatttgcagagatccccatctcagcagcacacctgaggctcatctgcgaaagcacctgcaacttctctacaacctcccacatcacctccaaacacatcctcatgtcatctgcaaacacacccatagctcacaggccaatgcctaaatatcattgcaggcaccttcagagaaagcacttactaaaggggtatacttgattccacatctgctttgacctgcaaatctcccttctcctttacatacatttgcatctcatttgtatgtcaatctaaatccactggcagagcctcagatcatcatctcaaagtcaggtggatgtggggctgggcaggcctccaggtgttcctcctcctgcttcctctggggctcttgatcctcctcctcttccttgctgctctcctcctcctcctccaatatggtgaccagttcctcccgcagcgcccccatctccagccccaggctgcacagctgtcccagcagctggacatccactcggcgcaggttcccctgccagtaggaaggggacgtcacagggatgccaccccagagagcaaggggtctctccaggacctgggtgagagcaggtcccaactcatgtcctggccacagcgcctgggcagggtcctcactgtgcccatggaccctaactgccttcctgcttctcagagtgtctcttgatctctaactcttctctttgtctctccatttcattgtccctgacttctctctctctgtctcctccctctcttatctatatctgtccctgtttccctttgtctctgtccccatttattttttgtctttccatgcccctgtctctctgtctttatgtgttgccatttctctgcccctgcctttggctctctttctctcgcttgccctctctctgccctccccaactttctcaaattcagtctgtctctccatctctgttcctgctctccgtctctgcttcccacctctgtccctctcttttgggatctccctgtccccacctctgttcccgtccctcactctatgtctgtctctcggtgtctgtacatgcctctcatgtctctgcttctatctctcagattctgtttttcgatctctggccttctctatttttgttcatttccattcattctcatttcctctctttctctttcccttccaaacccctcactcaccagctcctccctgatccacagcagactatcgcaggcacctccagtgtctgcccctgcagtcctgagggtctgaccagggatttccactggggagacctccctcagggcctgggggggtgggcccagccccggaggcaccagtccagcctgattcagctgcctccacagttccatcgtctctgagctatggctgcaaggagcaggaagtagcaaggtccagggtggcctggtcccctggggagctgtgtgcgtggtggagagtaaagggcagagggagtgggatgggggttcctgggaaaggtatcccaaagtccactcttcagagagaatcagctggccttgtgcttttctttttccttctgaagtctaacctcaactctgctcacagggttcaaacatagcctcttgcagaggtctaactccacccttccctgcctgtctcaggcctgacccctcaggggcgctcagtgtctgtagatgcctggcaccctctgtccttccacctgccccccaccaccacttctccagcctctcctcagcctccatttgacctctggcttgcccatagcttggtccttgcttgtcctcttggcacgggtcatcctagggctttcccaccagtgtgcctttgggggcaggaatggctcccaggggcaccaagacagcaatcccttagctggagtgcctgtgtccaggctgctggcctagggccaagcagccaattctgctgaccctggacttgcctatgggtatattatccctgttgagggtgagggcttctgctgtggaaaagtctgggaagcactgcaggcctctctcggccttggacccttccttcagacccaaggtgcatatatatacatatatataatggtagatcacgaggtcaggagatcaagaccatcctggccacatggtgaaaccccgtctctagtaaaacacaaaaaattagccgggcatgctgccgcgtgcctgtagtcccagctactcgggaggctgaggcaggagaatggtgtgaacccaggaggtggaggttgcagtaagccaagatcacgccactgcattccagcctggcgacagagcaagactccatcttaaaataaacaaatgaacaatatatatatatatgtattttgttttttgagacagagtctcgctctgtcatccaggctggactgcagtggtgcaatcttggctcactgcaacctccgcctcccgggttcaagcgattcccctgcctcagcctcctgaacagctggggttacaggtgcacgccaccacacctggcgaatttttgtatgtttagtggagacggggtttcaccatgttagccaggctggtctcaaacccctgacctcaggtgatctgcccacctcggcctcccaaagtgctgggattacaggcgtgagccaacgcgcccagccccaagtcccttttaccatagaaagtaacatagtcacagtgcccagggattcacaggtatggggagagggttcgttattcagctgccacacccaccttcctaaacctgctgcccttccagtttcctcacgtgcacagccacgcccgtctgcttttagtttctcaatctgttggcttaaccttcaaaacaggcccaggatttgagcacttctcaccattccctctgccccatccccattcatctcttgcctagactgctacagcagcctcttttactggtcccctgcatccacccttgccctctaaggcaagggtccccagtccctgggccaaggaccagtaccagcccctcgcctgctaggaactgggccgcacagcaagagatgagcagcgggtaagtgagcattaccgcctgagctccgcctcctgtcacatcagcagtggcattagattctcataggaggcaaaccctattgtgaactgtgcgtgcgggggatctaggttgcctgctccttatgagaatctaatgcctgatgatctcaggtggaacagtttcatcccaaaaccatccccaccccacccccgacccccagtctatggaaaaattgtcctccacgaaaccagtccctggtaacaaaacggttagggaccgctgctctaaggtacattctccacctggcagaaataatctttacaaaatgtaaatccgattttgacactcccttcttcccactgtgaatagaataaaaccctaccaggcctgcaccgtcagcccctgcccacctctcaacccagtctcctatctctgtctgcaagctggttcccacctcaaggcctctctgctctagaggctacctctccctgcagcgcttttcccctagatctttgaatggctctttccttatcattcacttctacttcaatgtcacctcttcagagaggcctttgctgatggccctacacccagtcacttttttttatctgcttctcatcaaaattgccttgctgattcctttgtttcttattcatcctctcccacatccatcctctcccagcccagaatgttgacttcctgagagagggactgggtctgtcctgctcaccatggtaacctcggcatctagaacagtgcctgccatcacgtggtaggtgctcagtaaatattcttggaactaatgaatgaataattctatccacaagacttcacaatggctcttcatgctgcgatctagctttcaactccaaactggtcttgagatctcacctcagtctctaaccttgacatctaacctcttcacccactctcttacctgaccctaatttttaaaaatgacgtggtcagcttttcagccccctcattccctgtttttaggaggtagtgagtggaagctggaagaataagaaagcttggggagactgcaattgcagtcaggaaagaaaggtactctgccgggaagaacaccccatcttctcctagggaaagattgtggagtcctggggtttgttttgtttttcaattttttgttttaagagacagcgtctcgctctgtcacccaggctggagtgcagtggcgcaatcacagctcactgcaacttcgacctccccggctcaagtgatccccccgcctcagcctcgtgagtagctgggaccacaggcgtgcaccaccacgcccggctaacattttattttttgtggatataaggttgccctatttctttgtggagataaaggctcccctatgttgcccaggctggtctcgaactcctggcttcaagcgatgctttcgcctcggcctccacaaagtgctgggttcacaggtgcgtgagcccgacctgtgtctcgttttgaagctcagggagagggcgctgtgagcaatccctaaaccctttaagagtaaaaagtgcgtgcacctttaagaggacggttagaaaacgcggggcgtggccacaggagaataagttcgcgctgaaccaggagcgtgggataagaccggccccttccggttacgaaaccttagcaagatggcggctccctgggcgtccctgcgcctggtcgcccccatgtggaatgggcgtatcaggggcatccatcgcctgggtgcggcagtggccccagagggcaatcagaagaagaaaaggacaatactccagttcctgaccaactatttctacgatgtggaggctctgagggattacttgctccaaagggagatgtacaaggtgcatgagaaaaatcgatcttacacctggctggagaagcaacatggtccatacggcgcaggtgcctttttcatcctgaagcagggaggcgcagtcaagtttcgagacaaggagtggatcaggccagataagtatggccatttctctcaggagttctggaatttctgtgaagtgcctgtcgaagctgtggatgccggtgactgtgacatcaactacgagggcctggataacctccgaacctccgcaggctggacatctcggacctccctgccgtgtccaaccctggcctcactcagatattggtggaggagatgctgcccaattgcgaggttgtgggagtcgactgggctgagggcctgaagtcagggccggaggagcagcctcgggacacagccagccctgtccctgcctagcctttagccctgtccccactcacgtggcttctcagcgggctgcatggaatgtctggtagctcaccacacttctggcttccatttgtcttcactcaacgtcagggtgggggagtggtgctggccaatcacaggagagagcgtgagttcccagtatttattcctggctgcccttggctaaaggtcacagctcctgtcaccctgtcaggcagccctttccatgcccctgttcaggcctggggaggtaaaggctcaggctgttagtagccgcagagagccacactcaccttgtcaggagactcttctcaaactgtccttatgtgagtgcactgccatttcttgcagggaccctgactgacacaggggctactactgacactttacagggatggttctcccccgtgcagggccgctgtgcccactgcaggacatgcagcatccttcgccccactccactcactaaaggccagcgcaccccaggccccatagtattgctggttatggatttattgactttatgttccaaattcagctttttcagttggctgttttttgaaaggggataagctttgtcagtagagggcaccgaacaggcattataggaggaaaggcgcctccttcgtggttcttgttggcctccactgaggcacctctctgggaataacgttccccagcaccccaaatggatttccagtcaattcagaagcattttaccagtgaagccctcattattccagttcactgttaaagccagtaattctctatattaaactttccctgttcggtttatactccggagtataaaccgaacaggattatattatctgaagctccccttttgggcggaatgtg

SEQ ID NO: 735313 - DNA, 188137 bp, Homo sapiens
ctccaaggctgagggatgaggagacctgctgaggacccagggccttatctttccatcccactccataggtcccagtattgactgatgctgtcttcacctcctagcctcacttttaaccttctggcacccgcccaccactgtccagttcactattgaagccctgccgtccagtgctgcagagggaaaggatgttcttctactggcctgcaatatttcagaaactattcaagcctattattggcacaaggggaaaacggcagaagggagccctctcattgctggttatataacagacattcaagcaaatatcccaggggccgcatacagtggtcgagagacagtataccccaatggatccctgctgttccaaaacatcaccctggaggacgcaggatcctacaccctacgaaccataaatgccagttacgactctgaccaagcaactggccagctccacgtacaccgtgagtgattcccccatacctctgggtgctggcggtcagttctgcttcacacacatgagattgtcaggcctgggctgtgcctgcatccccctctgcattttgtcccgtgttgagatttgggcatttagtgcaggacacacacatggtaggtaaacttcaacagatcagaattcctttcctgcatccaggccctgcagacactgatggcgggggcgggggggcctcagcagggggaggtcagtctcagccaagcaccccatgccctccccatgaacctgaccctgagaaagaccctggagaactgggtcagggcctggcctgagggcgtcctgggaacctcacaaaagcccagcctcaggactcctgactccgtgtgaccccgggaagcctgtgtcagggctggggtgtggtctcctgggcagggcttactgggagcaaggatttaccagatgtctgcgggctgtggttcctgaagcttctcatcagtgagggctcagctcccagagtctcatctagacaaggacagagcctaccactttccctgggactcagcctggagagggcagggggacaggattactagggcattggccccctgaatgaggagcttaagagatgcccttgggcagtcagtggcccaggggtaggaacagaggggagaaaatgttcctggcagcttcttgtccaccggggatcatgcccaggggtgctctcccatggaggcaaataacagatgctgttgatgtgaacacctcctctgtgccaagcttcatgtcagatcctgtgaataatttaaagttcattcacagacaaagtggcaagcctcagaccattttccatttacatattgtatggaggggaaactgaggcacagagagatacagacaccggccacggtgggcagatcgcagctggcagagtcacatgagggctgtctgcagctgctgccacgtcctctccttcatccctggtgccttactaggtgtctgtggaccttagaacagccactggttcggatgttttcttcttaggtgtctacagctcggagggggagattctggtctggagagttatgagtaaatacagaattaatcagttttttcttaactaaatcacctgcctcaacaatcagtcagtgctggggaagttcaggcctcctcgctcaggtccacaccccgcatctctggacatgaaatggcttcgtgtgttttctgatgtgtgggtatcattccaacaggaggataaaggggaggactttgctttctctccccattcacaccctgcaccagccagggcccagtgtgagacacatactccgtagttctctcatgaaggagggagggaatgaatgaaggaatgatctataacctcttcagagacagagacctggatacaagatcctaggaggttctgggcccaacgtgagacacacactctgtagttctcttatgaaggagggagggattgaatgtaggaatgatctataacctcttcagagacagagatgtggatacaagatcctaggaggttctggccacacctgttttctgtccctctagagcctaagacccatgtctcattcatctggcccgtttctcctaaatctgcccctgggagctgagtctcatctgaccctggggctgcagggctgtgggaaggttttcaggggagggatcaggcttgcgggtagtcccacacgtttgccttacaccctggagctctacctggttctcactatgaatatcccataataatcccccctatcctttctggggagtagaaaaaaagtaaatatttaaaaatatgccagagcatctgttcttcttagcaagttcagatagttattagttagcaggaataaatcgttattttaccagagcctcacctgctgggggtttatgggagcctaactgactgaggggggtgggaaatatccaactccagccccctctagccatcatgtcccacctaaaggagagaaaaaactgagaggcacttgtgacattcacagcccagggcacagactctatccaggaccacagaacccctccctccccccactcaccaccgcatcactgaacgcctgctcacccaagttcctgttgcccagtacatcatgtcctggctttcaacaaaaactacaagacagactagaggcaaaaaaaaaaaaaaaaaaaatgcagttcgaaagacagaacaagcatcagaaccagatgcagatgtggcagggatgtggcagggatgttgaaattatcagaccaggaatttaaaacaactctggggccaggagcggtggctcatgcctgtaatcccagcatttgggaggccgaggcaggcagatcacctgaggtcaggagttcgataccagcctggccaacatggcaaaaccccgtctctactaaaaatacaaaaaattaggcaggcatggtggtgggtgcctgtaatcctagatactcggaaggctgaggcaggagaattgcttgaacctgtgaagcggaggttgcggtgagcctagattgtgccactgcactccagcctgggcaacagagcgagattccatctctaaaacaaacaaacaaaaaacaatactggctaatatgctaaaggctgcaatggaaagcatagacaatgtgcagaacagacggatgctgtgagcagagagatggacaggctaagaaagaataacaacagctactatatctatctatctatctatctatctatctatctatctatctatctatctatatatatgtatatatatgctagagatcaaactcactgtaacacctggatctcagagtggttgtgaggatgtttattaggagattaaagagattaaagcagagttatacacagggcgagagctcaactgatgctatcaactagtattcttatttttttgatgttgttattggcaataaaatcaggaacaatgcagtaaaaatttggttttatcatgtacgagttctgtgaccttccttgacttactgaggtactgtaagtctcagattctaactctgcagatggcggtgatgcccctctccctcaaggtgatgtgaggatgagatgagctgtaggtaggttggtgcccactgtgcctggcacatggaaggcccctgaaaatagtcaatgaacatcatccccgctcatcagcatggagttgacagtgagggctcgctctctgtgacaatcatggaatggaaaagaagaaacaagaggaagactgggcgcagtggctcatgcctgtaatcccagcactttgggaggccgaggcgggcagatcatctgaggtcaggagttcaagaccagcctggacaacatggcgaaatttcatctctactaaaaatataaaaattagcctggcatggtggcacaaacctgtaatcccagctacttgggaggctgaggcaagagaatcgcttgaacttgggagatggaggttgcagtgagccgagattgcgtcagtgcactccagtctgggtgacagagcaagactccatccaaaaaaaaaagaaaaagaaaaaagcaacagagggaagaggtgtgacatgagaggaagaagggatttaaaggtacaggagcagggcgaggtgcaagcacctgtgggagaatgtaggagttggtacatcccagtgtgtcaagtctgagacacagaaaatggtgcaaccgtggagagcaagggagtcagctatgaggacagcccaacagaccacactcaggctctggagcatttccttcctccctgactatgcccctgccctgcaatgccccttatggtttcccttggaacaaacttgggccttgtcccctttgccttcccctttctgcagaaaacaacgtcccaggccttcctgtgggggccgtcgctggcatcgtgactggggtcctggttggggtggctctggtggccgccctggtgtgttttctgcttctctccaggactggaaggtaccgcagcttttccccagcctcctcccacccctaggctgaccccagtcagggaggagggagaccccgccctgtattcagggccaggctttccgcatcctcccaaggaatccttccctctcattccatggctcctcccttgccagctgctgatcctaggctgcctcttcctttatgaatgtggcacagttaaggttgcacccctgagtgctgtcctagttccctaacacagcaaagccacagctgcctggagggaggaagggagggagggagggagggagataagacgggagtgctcagaacctggtaccttctgctgttcattgaatttacccacccagtgaggagggatttgcaggcttgagatccatggtgggggtcctgggcatggtcacgcagtggggagtggcaaagcctggacaggctgggtagggtcagcaccccatcgtgattgatgtccctgaggtgtgagatgggagaacctggacctcaggacctgctgtcctttatgtctcttgccaaggggtggagagagagaggacaaggccattgccccatttcagcatctccaggcctgaaaggagggtctggccatggcagggatactgagttctgggagaatatgatacatgctccttgcctccccatgcccccagctcccccagtgtcctgcacacacagccggccctgctttccctctggggccttgacccttcctctcaggcaaacgcaggtggtctgattccctccctgagtcctcagtccctttcctgggtccctgggtcaatgttctcctcacccggcatctgcctgggggggtccttcctctctggccaggacagacgtgactgcttaaggcctatcctcagctccccgtcctcggccgctcctaccacgaaactgatggagacaggaggccttcactccagtccttgaaaatggagtcccttccttgtcctttattctgcccctaaacctgtgatttctccctgcaccctcatgaataatcctgacctttcctagggccagcatccagcgtgacctcagggagcagccgcccccagcctccacccctggtgagtgtcccttcagcccaggtgtgggagcccctaggcctgccctacggtgtccactcctgccagtcaccccctgggggcctctgaccctttctttggggctgcaaggaggatgtcaggaaacatgacacaggggaccccgactgtcttgttcagactgatctgtgggctctgggtcgtgggtcacctcctcgacctcagctgctcaggtctcccctgggaagaggctccctctccctgattctctgggagctgaggacccctacactctcctgcaggaggggcccaggctctcctcccaccctgctgctcactcctgtctctgtccccaggccatggtccctctcacagatccaccttctcggtaagcctgttccctccccagcccttttctactggggtcccaacagtgcaggctcagggcagggggaccatcaaccccacagcacagcactgacccacctttccccagaacagtcaggtcaaagtgagtgcctccagccaggatccgggcctctctacagggccaggaccacccacgccatgtgctgacccctccccgggaccctctacacctgaggagaaccctggagtccagcaggtgcagaatggacactgggaccatcagtcagaggcccacattaacaagggtgcggggtgggcccagccaggacaggggtcagggtgttgtgtccacactgggaggctgagctcaggggcagagctggtcaatcctgaggggaaatgagtggaagtggaggcagggaagtaagtcctggccgatcagagacaggaaccttccaggctgggcttccgtgaccctccctccctgtcccctgacatctcctctctcccctgcccaggcccctctacccagccccagaacagccactcccatctatgaggtgagtgtgggccatggatgttctggtcccgcaggctccaggggacccaggatctgcccccaccagcacctggctgagctcagattcaggaaaatgcagtgaaaatgagaacaggtggtggtgagcagaggagggaggggcctgggaacagggaccccctgagcacagccaggttcagccccagagaagccctgggtgggcccagagcctgggagatgccagacactgttctgagaaggctacaggggttgaggcctcttctctgtttttacaggaattgctatactctgatgcaaacatttactgccagatcgaccacaaagcagatgtggtctcttaggttcctctgggagctgctcttgtgggttgatggagcgtccccaaagctcccagccctggggacggggaaggacatggagcctgagccagagaaccagctctgagtcctgaggagacacaggcctggggacagggagggatgggagtccctgctgaatatctggagaccctgacaggttgccctgggctctgggtgggccgggacaaaggcctctcatcaccacaggaagcgggggcttgcaaggaaagtgaatgggcctgtggcccacccggggtcaccaggaaaggatctgaataaagaggacccttcctctcattggctctttttctgctcacgggaacttagcagaaactcacctgaaactccgtgtccattctctcccgggtcacacagggaaaatatctccaccttgtctcaaccacagtctctcttccctgggaggcagaaataggggttgggagtcaggctggggtgggccctacacaggaaagggcaagattcacatgagccctgcccagccagccgagcgctcagctgtcctcacactaccccagggaccaaggccatgcacagccccagcctgggtccctctgtgaatgcatgtggggtctcaggagcacagaagatggggccatctgatgtccacaaaaggtgagcaatgcgggagcaaccatgggtggtataggttgcggctgtggcccctacgcagcctccagtgtcctgacccctgctgccctcttcacccaggccctggaggcccagtctatcactgtcctccacaaatgaacttacctgtccccaaatccaggatcctgtgtgcttatacctggccactaggttctcctctgtcccagtggctactgctcaggacatctttatccctggtggggcacagagaggggctgtcagagcaaccaagattaatacagacgcataattcagtccttgagcactacccaggactctggcccctcattgctcatcagttcccactttaccccctggcatggatctcactgagcaagccaactctttacacaggagcatccaggtcagaggtgcaggactcccccatctaaagctcatgcaggctcccatggcgatgggacaacctgtctgctcctctccctggcccacagccctatctcgcctgcagctcctccacacacctgggacagcagttctcagcccttccctgagggcccctggaagggtgatgatctcatataggttcacttgaaccaggtgccaccttcccacaagtgagctggtgcctgcactaaagcacagagccacagttcccaagagtgttctgccactgccacaggtcccaagagtgttctgccactgccacaggttgttcgtcctgagatgagaggtaagaaaacaacccgcaatgggttgttttatatcgggatttgcatcaggatttagctctaaatgacccctgatcccacctgcacacagcgtcagatgagacaaggtgaggcctctttagttttctgttgaggctgtgacaaattaccacaagcttagtgacatagaaacctgaaccaaagtgcccacatggctgtgttctttctagaggctccagggaagagtgcatttcctctccttttccacctcctagaggcctcctgcaaccttggctgtgtcctctttctccatcttcaaagccagcagcacagcatcttgaaactattctgtgccctgcttccatccccacatctccacctcctcccacctccctctctcacttaaaaggaaggagccttgtggttattttggacgcacctgggataaaccacaacaacctccccatctcatgatccttcctttaatctgtaaagtgtcctttaccacgtgacatgtccacagatctggggatgaggatgtacacatctttgagaggcccttgttctgtccatcactcctctcaaggccatcttctcatcatcgttcactacaaactacacatgggcacctggatgggttcatcatgactgtggcgtcagttcctgcattaacatccccagcaccctccagatcctgagagagggagacggagggctctccatgcccctagtacctctccaccttcttcttggtgacatgcttagttgctaagaataacagaaagcggaggtgactgaaagatcacaactcaccggcccttcaatagttcgtggacatcagcaccacggacagtgactcagtgaggctaatttccaggtggcagcagggagcatgcagataggagggaactgcaggaaaagctgcccattctattctatatgagaaagagtgtaagaaagaggaagctattacagggataatgctattcttctctaatccataaattgcgaaacctttgcatgtctggatatcatggtttttagcacatctgctgccactccctgcagggctgattgctgcatccaggatgtggtctcttggggggctcacagcctgctttggcctcatggtgagtctccctgcccctgacactcaggccactgtctctgcctacaacatggtgggaaccttccatgattaacgtctgattctctgtgcctgacctttgaagcacatccatcactcagcctggagcatccgctgagctcagcatcctgctcctccatccccagctgagcccttgaggagatgcttgagaggatctcctgggctcctctgtgagctcctccaggctgagccttgtgcttggtgtcagaggcctttgccatctgcttgttctttccataggcaaataatcctcctcagggacaagtggggcctgaagatctgtctgaatatctatctatctatctatctatctatctatctatctatctatctatcatctatctatatgtatgtatatatgagaatgctttattaggcaaaactgcatactatgaacatgctttaaaatgcaacaggatgagatgtgaagacataaagaacaagtgtgtagtgacacatggctatcagaacacactgaagaatccacaccgcggccgagagcagtggctcacgcctgtagtcccagcacttttggaggctgaggcaggcagatcacttgaggacaggtgttcgagaccagcctgaccaacatggtgaaaccccatctctactaaaaatacaaaaaatttagccgggcctggtggctcatgcctgtagtcctggctgttcgggaggctgaggcaggagaattgcctgaacctgggagacacaagttgcagtgagctgagatcgcaccactgcactccagcctgggagatagagtgaggctccatctaaaaacaaaacaaaacaaaaagaatccacactgcttccccgcttcactttacccagaaaaggaatgttctaggccacttcctcttcagcacacatccccagggaactaaaataggttcacagtcacccccatcttcctcattcccatcacctcttacccacagaggcatctctggtcctacagatccagccctgccttcaagaggcacaggtccaacccatccagtgtccctgctagtcacacacagcactcagggtacaatggagggcttctgtgctttggatgggaacaaaccccacctcacattcccacacctgagaagccaccagggtcctctctgtcctgtcctcacactcaatgtctgtcctgggtcacccttgtcatctctcctggaaataggcatggctcctgacaggtaggattgaggctttgtcttttcaggagtccctcccactctgagcacatgaaactgctcagctccatgcaaccctctctcaccaggggccttgttctctgggtccctgaatacctgggtccatgccatgtacattttaagaaaaatgacagtgactctcaccctgacatcctcacccaaggcacgtgtctgacaagaatcaccaggtgagatacctgtggctccacacacctgaggcttcactgcgcaggggtgtcctcatccctctcctcccacccctagggacagtaagcaccacaggctgccttggaccaccagctccccctcccagacacagcctcagatctatactgacatgctacatggagaggctctgatgaacagcaggtattaggaaatcccaccgaaccaggtgccacttgcggccccactcctcctcatatctgtgactgggacagacacacataacacacctctgttcaccgcccagcccccaaggtcaatcacagtctgcttctcccctagatccactgctccccatgtcttccgtcctcagctgcatcctgggtggcctccttgctgttcttgtaccccagaggcaggttccaacctttgtgatgttgcctgcaatgcccaaactttcccttccccttccccttcccttttcccctcccccttcccctccccttcccctccccacccctatcccttcgtcttcccttgtcttcccttcccttccctataaagccaaacatacccatccacctaccttgtggtcaaagtcatcagcctcctgctccactcagtgttctctgaccctgcatatggaggtggtggcccctcctagaacacccaccactcactgtcagccttgcgtggtaatcacagattttgcaggggttacctgtgttcaggtgtgtcacctgtggaaccagaactcttggaaggactggcagagggagctgcttaggatatctcagggctcctggcatctggtctaccacagggctattaacaacagcacttagggacaaggtggaggatggacggttaagagggtaaatatggatgatgtgtgggcaaagaataggacacaggaacacatgcagtactcaaataattatgccaagaaaggtgaggacatggagatggacattcccatatacttctgatgggactgcagtttagtccctacagcaacattgacctcatcatgtttaacgcgcacacgctctgaccactatcctacttctgaaggcctccctgtgctgtgagctctgagaaggccaagcttgcctgttctgtctctgctaaagccagagaccagccaatagcccagcacagggtacttcataaatacatgttgaaggaatgagctccaggaacagtactccacatggtagagatgtgtgtatgaggatgttcactgcagaaggtcatgtcaatgtgacaagtgacgagcagcctcaaatccagcaacaggggtgtgggtaaaagatcatagtgtagccatgcaatggaaccaatgaaaaaaccacaattagagcaaatccacatgtattaataaaggaggtgccctccatacatgctgcacctaacagaatgttgccaaataagaatgaaaaatgatgatatttgggctgtaaaaactagaagtcagctaaataagaatgcatcgaaagtatttgtgaatgcttacaattttataatgccttggcatccgttttggatggaagttggactttctcataccagaagcagggctcagtcacctttgaaatagtttccagttctccacctccttccagttcctcagtgtgattgatcagatatctgatttatacaactgcctcctggtgacctcctccctatgggacttccggatacagcccgtatgactgccccactgaccccacaccctgcctgctgcagtgaccacctctaattacctggatctcatgtctgcttgcattaaatccaccaattaaaactccctgaggacaatctgtttgaataatattctgtaccctaataaaggccttgacccatgggttccccctctgtcctccccatactgcccctgacctctgtgtgtgtgtgtgggtgtgggtgtatgtgtgtgtgtgtgtgtgtgtcctccagacagggcctgtatcccccaggacctgtaagtaataaatctttattttcatcttatgtctctcgcaatcattggcaagagctctgcatcttaaagatcgcaaatttaagaaattggtgtagtcggcacaatagagtacctcttctgtttagcacaagatatctcggagctgctgaggcttttaacatcctcgccggtgtggctgcctcactggtgaggccgttctgttcagtgcaattcagttgctccactgtgtgctgctgtgttgctgctgtagagtgctgccatgttgttctccccaaattgttaccgagtaggaacctgtaatgtgctcccaaggtggtctaccccatgagaagggggattctccatctagggcaagggctaggtgtgtttctggaatcctaatagggaaggcatccacagagggtgaactccactcctccttagagtgaggagtgacatttcccatttattttccccatggaggtgccatgtattgactttttctttcactgtcccaaggttgagccaaggtgagctatggagaccagggcaagataccatttctgttagcaaagcaaatgggtgacaacgtgtggagaagctgtggttctcctgatggatatagcagagtgccatttagtaaaatcttgtcaggaggctgcccctggttagaccggcagtgtctgtagtcactaaggtggatgcgaattttaggccctgggccatggataatccctgcagacacagccgtggcttcatgtgatggggcaatcccgggctagtggctcccttgtttctgcatttcttgctgtggttgcacaatcaacacctcaggggttgattgggtcaccttggaaagagaaacagctgcctaggaggctggtgcacatggaggccaccctcaattttattctgctaacaagttgtaagattaaaacaacagggggctttgggtaccatcaggaacttgtcaagtaaacatccaaagacagaaagaagaaaaagaaaaagacattaaccgtctagaaatacaagccattttaaagattttgcttaaaagatgcgcttgggctgggagcggtggctcacacctgtaatcccagcactttgggaggccaaggtgggtggatcgactgaggtcaggagttcaagaccagcctgaccaacatggtgaaacctcgcctctactaaaaatacaaaaaattagcagggcatggtggcaggtgcctgtaatcccagctacttgggtggagaatcgcttgaacccgggaggcagagacggcagtgagccaagatcgcaccactgtactccagtctgggcgacagagtgagacttcatctcaaaaaaaaaaaaaaaaaaaaaaaaaagacgggcttgtttcgtcgttgtggagtcatcccagagagaggctactccctagagtcactgaccacctttcctcctccatcttttcctcttatcattctagagacagaaaacaagaatctcagctttaggtggctaacctcaccccccaagaaaagaaactaccactttgattgactacaaatccaagaaaaataaaagagaaactttaaaaagtactgagcaaaccacaggtctagcaaacataatgctagccctaggttacttattcatttacaacaaacccctagatataggaggaaaaaataaaaggtaattaaatatatacacatacaatattttaatataaatatataataaatagttaaattatgtatgtataatatgtaactaaatcaaagtaaaatttcatactttgattctattggaaattcaaaattcatttattaacttatatattaaggaatttatgtaaaaaaagatttttaaaagggcaccaatttgcttttgtgtctctacaacataggatctaatttaactttacatttgctaaatacactaattgacaaatattcatggatttaatcaatactggggctcaaattgtagccacacgtgggaatcccataaatttaaacactctgtccctattatcttgagaagaaaactaaatataaaattgaaaaaaacaggtatgtctcaatttacctgtaactttgcctaaatttcccggagtcatatacccattgctgtaaaacattctctattggacataggtgctctgagacaataaataaaatagaagtgtttttggtacttagacattggcttgacaaaatgggatcccatgaaacctcagttaagatagtgaatacggcccaatgtgagttgaaatggggcctttaaggattaaaacttattacatgaaacctagtaagtaatggggtgattatccatactgcttctccatttcatagcccaattttgacagttgtcaaatctggaaaaaacaaacaaacaaacaaaaaaacccctgggaatctgttgcctcacagagacacaaagtagacatcaaaattgtatatctcagttccagttccaaaatggtggcatagaagcaagctggctttactccttcacacagaaaaccaaaaacaaatatacagcaccaaaattattaccagatatattccagaactcaaatatgaaaatgaaacagttttcagagccacagagaagtgaaaaaaactcccgacagatgacaaaagaatcagatttccccatctgtaatgtccctccctgccccattctgcctggtaccaggtgtgtggaaaattttaccccaactcatggtttctacactgggaaatgtaagatcaatgcgggcaaccagtttctgcacaatcctgggttccctgtccctgccttaacccacaagaagcattgtgagtgcccgaagggagaaatttccctgaggacagtcaaagagtggggaggcaggactaccatctccttccctggaaactctgctgtgtaactcagccaagggagacatgaaatcagactggtgtttcagcagctccatgttgtagtaggtttgtttcacaggtatcctgggcatggacatctagccagctttcccacactgccaggatatcccctttgggacctccctcagttaggaagggcacactctgatcatttactagggccaaggtaaaccctaaaggtaacttagagatgaaaaggaggtagtgacctagcagtaaagaactctaagaaaatctatccaataaaaatcaaaacaagccagacaaagactaaaataaataatgaatccttcaatgtaaagacctggacttacatccacaagaaacagtaagcaggtaaccatgatctccccacatggacaaagtgaggaacaagtgactgatcctgatgagatggtgatgtgtgagctctctaatcaagaattcaaaactgcagttttaaggaaactcaatgatcttcaagaaaacatggaaaagcagttcagaaatttatcagagaaatttaacgaagggattgaaataatttaaagaaaacaaacaggaatcttggaattgagaaatatatttgctgaacaggaaaatttattagagtctctcaacagcagaatggatcagaggaaagaatcaacccaaataagactcccccaaggcataaaataatcgaattctcaaaagtcaagggcaaagagaagattttaaaacagaaagagaaaagaagcaaatggcataaagaagctccaattctgtggcaacagattttcagtggaaatcatacagaccaggagggagtgacatgacattctcaaaatgctgaaaaaatattgacatttgagaatactttatccagtgaagttatccttcaatataaaggagagagaaagtttcctagacaaacaaaagctgagataattcacaccatcagactagtcttcctgtaaatactaaagggtaaatactaaatacttcaatgtgaaagtaaaaaaaaaaacactaacatgcaaaacaaccacaacaacaataacaacatttgaaggtataaaatccactggtgaaattaagtacgtagacaaacccagaatactcaaatagtaattgtggaaagtaatccaatcataactctagcatgagtctcaaaatataaatctatcaaaaacaataatacattttaggaggccaaggttggcagattccttgaggtcaagagttcaagaccagcctggtcaaaatggtgaaaccccatctctaccaaaaaatacaaaaatttgcagggtatggtagcacatgcctgtcgtttcagctatttgggaggctgaggcaggagaattgcttgaacccaggaggtggaggttgcagtgagctgagattgcactactgcactccagcctgggtgacagagggagactctgtcttaaaaaaaaatagctacctgtttggagaaaggtaatataaaatatgtaaatagagacaaagtcaaaatttgcaaaggatgaaattaaagagtagagtttttttggggggttttctgtttctattattttatttgtgatctaagataagttgttaccttttcttctcttgaagatactttgttatatctatgtttttggaagtcttatggtaactgcaacgcaaaaaatctatgatagatccactgaaaataaaaaacaatgacttaaaacatactaccagagacaatcaaccacaaggaagacagtaaaaaatgaagaaaggaagaggggagttacaaaacaaccagaaaacaggcaacaaagtggcagtagtaagttcttacttaaaaatattgaacactgaatataaatggactctattctccaattaaaaggcatagagtggctgaatgctgcctatatgctgcctacaagaaaccacttcatgtaaaaagatacaaatagactgaaagtgaagggggtggaaaaagatatttcatgcaagtggaaaccaaaagagagcaggagtagctatactgatatgagataaactacaaatcaaagactataaaaagagacaaagaaagtcactatgtaatgataaagcgctcagttcagcaagaggagatgccaattataaatatctatgcatccaacacttgagctcccaagtctcccaagtatttaaagcaaacaatagtggatctaaaaggagagatagactgaatacaatattaattaggggactttaacaccctgctctcagcaatggccagatctttcagacagaaaatcaacaaggaaacttcaaagttaaactacacactagatcaaataggcctaactggcatttacgggacatttcactaactatctaactgttacagaattcacattattttcatcagcacatagaacattcttcagaacagaccacatcttaagtcccaaaaccagtcagaataaattcaaaaaagtttatatcacatcaagcatttgttctgaccacaatggaataaaactacaataaatgaataactttctggacacatacaacctaccaagatggaagcatgaaaaggcagaaaaacccaacaaaccaacatgaaactgtaacaaaaggaaaacccaggaccgaatgacttcactgctgaattctaccaaacatttaataagaactaaaaccaattctactcaaaatgctttaaaaaattgaagaggatggaacactttcaaactcattctacaaggtcagcattatcctgataccaaaaccagacaaggacaggacaaaaacaaacaaacaaacaaacaaacaaacaaacaaaaaaacactacaggattgcttgaggccaggagtttgagatcagcctgggcaacatagtcagaaccaatctcttaaaaaaaaaaaaaaagaaaaaaattagccaggcatggtggcatgtgcctttagtcctagctactcgggaggctgaggtgagaggaccaattgagcccaggaggttgaggccgcagtgagccatgtttgtgtcactgtactccagcctggggaacagagcaagatgctctctcaaaaacaaaaagcaagctgggtgtggtggctcctgcctgtaatcacagcactttggaaggctgaggtgggagaactgcttaagcccaggagttcaagaccagtctggacaacatagggggactccatctctcaaaaacaaccaaccaaaacaaagccaaaaaagaacataggccaacatcactaacaaacatagatgtaaaagtcctcaataaaatattaacaaaccatgtttagaaacacatcaaaagagatcattcactatgattaagtgagattcatcccagggatgccagtatggctcaacatatgcaaatcaataaatgtgatccatcacattaaagagaaccaagaacaaaaaccatataatcactccagcaagtgcagaaaaggcatttaataaaagaatgggttgagggagtggagcccatagtcagagcagcagtggtctgggattttggaagtagaaagaagggcagcaccactggccaggaccaccagggaacacccccataggccctgggtgttgtgctccagggagggttccctctggagttattaatcttggtgtccactttgcccagctgcccctcacagggtcagggaggatgaagggaaagcttccttctaatgaaagttcagggactcacagttcctagagcctgtagggagaggaagatcttcgaggaagagcacctgggcattggggcgtttgagaggaagatctatgccaggtccaagtggacaacctgtggactctctctccagggacatacgggtatctgggaatctcctgtagcttaaagaggtaaagacctctccctttagcctgaggactggaggatgctggttcaggtgaatgagtcctgcaggggctggtacaggcctggagggtggtggtgtccagggccttgggttcacccttagcatgattcaggccgggcggtgtttcacatgagcaagagggcctgggttcattgcttcaggacaatggtgaaatctcatggtggaagaaatcttgtccttgccagtgcccagctttcatttggtcttggcccagagtgtcctccctagagaagactcttgtcccttcttcacactgcccttcagggatatgccagccttatgggataagatggggtggagactgtagatgtgggtgggaatctctccacagagtgctccttctctcagcggttgcaccttgtctcagggcttcagcttgaaatctgggatctccaagcccttccctccccagtcctggccaggaccacatgggcagatgcattgtgtgaagtgcatttcatttggggtgtcctctctgcatggcaccctcccgttgattctctttgcgcatgtcagagtgcaggcaccatccacacctcctgctggaggagggacggagctgttgactcctgagagctgatcatgtgttcccaccctcacacacaatcatggtccatcctctgagggacatgtgttgccaccactgtggagatggtgcaactgacagtaacaaacagtaaaatctggtactgaatgggaccttaagccaacaatgacaatgtcattccaaggtgtttcatttttattgattcaatgcaagtcacctgatttcattgactattcacaatagctcgataaagtaaatgcatcatcaccaccactttaaagaggaaaaaggtgcttgggcagtttgtgactactgtggtggctgctgcattgctctctggtaaagccaagtaggtggtgggtgcggcctctgggctgggatgatccaccctcctggtggtggcaggggagccaagctggagccatggcctgtgcagtggtagcagctgaactgaccgctgctgcaggatttgcaagctgttacattttgcgaagccatgaagcacataaaacctcaagtagaacaagtgtttcaaagtctaccaaaatctgccttcagagattattactacagaggtggatatgaacccaaaatgacaaaacgggaagcagcattaatactagataatgaatgaacactagtaatagtagggtaagccctactgccaataaagaaaaaaataagagatgctcattaacatgttatgctcttaaatcacgcagacaaaagagggtctccttatatagtagccacaatcaatgaagctaaagatttactgcaagatcaagctaaaaacagtaggtgtataatgaatttttaacttcatattagtttatgtatatgaatatcaagtttttataataaaatgcctccaaacaaagaatatttgatttagggtttaataacttctaagaggggactcagatgtttcctgtttcacagtcagtctgagagggtcatttttcctggagctgacctgggtggaggcctcacactgatactccccagcatcctctctcctgatggggtttatgctgagcatacagtggccctgggacagctccattctctccatgagtcacagacgctggtcatggaagatccactggataaggttccagagtcatctgtggggcaggtcaggatcacaacatccttttcttctgtgactctggtgttgctgactcagatggggtcggagccactgaccctgtggacaatcagtggaggtgctcaactgaaagtgggctgagggcacgtcttctcctccatccctgggtccttaaggtaactgtggaccccagaccaactgacacaggagctagaaagaaattatttaggaagttagtgagggtaagagcgtccttggcaaggtttcccctttaacaaaaagcagcccaagataattccttttctaacaaagagcagcctgaaaaattgagctacagatgtagatgagcaagatggaagcttgcacaggtgaattccagtaggtgtgccaatagaaaagggctgcctggaagccaggtatgttcaacatggagactccatcctcccttttctccattaccacatgtacagtaaaaaaccaggcaacatggcaccggccaggtagacaatccatctgcatgacaaaagatcagagtggggcagccagcaaatggcacagctggtctaaacaatctttcaccccctgtataaatcagacactgcctcctgaagctcatctataaaaccttctgcatttcactatggaagtggcaacccattttccccaggacccctctctctgtgcagagagctcttctctttctttcccctatgaaacttccactcttaacttcactctgggtgcctgcatcctagttttccatggccatgggacaatgaacctcgagtattaccccagatgaatgatgctgtttcacaatcactggttcagctcccttcttcttagggtttcacagctcggtggggagaataccacgcctcagtggtctggggagtgaggaacaaatgaagaattaatcagattttacttagaacgctatcacctgcctcaaccatcagatccatgttgggaatgtccaggcctcctctcttagatctatacccacttcactggacctgaaatcctgtgtttcccgatgtgttggtgtcactcctatgagaggataaaggagagaactttgctttctctccccactcacaccctgcacaagacagggcccaatatgagacacacactcgctcagtagttctctcatgaaggagggagggagtgacctcgagtgattctgccatctgtagtctgtgtaccctggccagtggctgtatcttcatatgcctcagtttcccctcagtaaaataggacacacaatgagaactaaaaataaaattctaattccccagtgaactgaaaggatggcctcttggccaagcggatcccagagttcctgatcatgacaggatgggaggttacacctcattacagcccctccctttggaagtttagaggtgacaactgactagcattaacgctaaaatcgagatcatgagactgacagaacagactctctgtggccataagataccaaattataaactcaacctaaggtcatgcaggcaagggctaagccacactttcctacatttaaagaataagctatgttctaacacagaattttctttctctctagcggctaaagtaacactagccttcgagataagcaatattgaaatgatcgcggctcatccaccaacactggctaactgacccctgttccaacagccacaactacacttcaattggacaggagactgatttcagtaactttctcctaataagagaccactgagcatggcctggttctgctggtatacagacacggtgcactgagtaccataatgcttgtttcatcttttgatgtataagacctaatttaatacatttaaatctgaattctccaccccaaagtgaacatggggtgcatgtagcatgcatgtttgttgatcacgcatgtgcgtgtacttcctttgtgagtatccatagctccacctataacctgttgaatatgtatacctggccaactcattcagcataaatctatcttccacattcccctcccttgaagtgcctgctattggtctctgctggaggctgcatcttctaccctggggaatggccagcctgcaggctgtaaccctgtgtaagaaataacctggttgggtgcagtggctcacacctgtaatcccagtggtttgggaggttgaagtggtagaatagtttgagctcaggagccagagactagcctgggcagcatagcaagatcctgtctcttaaaaaaattttagggaggagagtgaggatcagaaaaaatacctattggctattatgcttagtacttggatcatgaaataatctgtataccaaacccctgattacatatataacaaacctgcatgcgtatctttgaacctaagataaaagtttgttttaaaaactatctgggtgcagtggtgcatgcctatagttccagctactcgagactgaggtgtgaggagtgcttgagctcgggggattgaggctgcagtgaattatggtcccacctgtgagtagccacttcactcaaacctgggagacagagcaagaaccggtctctaaaaaaaaataaaaatagaaaaataaaatgaaaaatatatgaaataaagtctcctttccaaacgtacagatctccgatttttctgccaacaatgataaatggtcagtggcttgccatgttgtctgtgaattacttttaaaatattcacgatcacctgacctaaaggttggtaccaaggaaccgcctgaatacaccgtctctgattatttgcctccaacagagtgttccctgggcctgatctctggtggacaatgagctgctgggaacatcctctcttctctattcctcccctggggatgctgaccttcccttggagtctcctaagttccccagggcagtcggctaatgtcctagggagcttacctgtcttctccataccaagtctcatgtgaaggacgaggctttgcccttgcccagatgaggctctgggggctgagccctggctggctaccagctgcaagagccatggcccttggacagctggtaaatccttgttcccagtcagccctgcccaagatgcctcaacccagccccggcacaggcttcccagggtcacatggagtcaggatcctgggacaggggactggacaggggtttccagggctgagtttctgaacaggggcttcccaggggtcccctcactccaggatctgacatggtcctacaaggaacgtccatggggaggggacccaggagggggaactgacactgacctccccttactgagcctccccccaaccccatcagactgtccttcctctgtagcaagtgcctgcagggtctggatgcaggaaagaaattctgatctgtggaagtttgtctcccctgtgtgtgtcttgcactaaatgtccaaacccccaaatgggatgtaatgtagagggggacacaggcacagcccaggcctgaaaatcctgtgtgtgtgaagcagaactgacccccaacacccagagctcatgagacatcactgtgtacgtgaaactggccagttacttcttcattcacaagatctgtttttatgacttgtagggtgtaggatcctgtgtcattgttggtgacattctgtatcagcagacatgtattggggtatattgtctctcagcctctgtggcaggtcctggggtaattacttgagttcctagtacatatcctgtaattcccctttgtaccagttgtagccaagcctaaggcagattgtgggtgagtggaagaatctccttgccttctgcagcttcaacagtgacttgggcagtggtaggcaagttccagaaagttaaaagtgaggctaggagtggggagagagcatcagttaatactgggccctatgcattgaggtggaaagatggggccctaggtcctggacaggtctcttcatccctcagccttggagtgtgtgtgtgtgtgtgtgtgtgtgtgtgtgtgtgtgtgtgcgcgcgcgcgcgtgcgtgcgtgtcctactgggccaaggtcagcagcatgacctcccttccttcagtgcctctgaccttggcatttccctgtttggagtccttttccccaggggtctgcctggctccctccctactgccttcaggtcctgctcacattagggcatccttgggagaccccttccctgacacctctagagaccctgggtcttccctttctgacctttcgctgctgtgttccctccagggctcttgtcaatacttgacctcacattctagatacccttgcatgtctgtcttcctccctatgagagcatgagctctgtgagaacagggacttgtgtgatcttggttgcaccccagtgcctgggacaggctgcggactcctgtggatgagctcatgagtgttcccagggcccttcacaacgtgggatttattttccaatggctgaggttgttggctaagagctctgttggagttcaatcaggctggtgggaaaaatattagagatagttatagagatagacacaaatcttcttggaagaccaaaaagtttgcataactttggtaatagatctgactgaaggtggtccctttacctttagttaaacaaattaaagtagtaacaaaggaaggcagagtagtttgtctagccagcttgtttactcatgtgatcttaagactaaccattgatgtgccacaggtgcttaattgctttctacttgggaagtccacaatgtcaattaccctctaacggtgttgactcaagcctttgttaattaatcttactgaataaatatgagtctcactagctgatcaaggccatggtcacaactgtttataggactcagcagggagtctgtaagcggccctgacagactcagctggactggcaaagcaaaatatgtgtgtgtcagtgtacactattcacccgtcccccacagctggtgcccctatatgaggagtgctgccacagagctctgtttagtgtcccttgttttttttcttgagtattaccccaacttaaattgtgattattgtcatctgttttcaacattaactgctcagtgatgattcacttggaaaacattaacaatcgagattgtttcttcactaacaacctcagattatttagattttcctgttgtaatcccttcttcctgtttagtgtccaacagaagccctctgtccctctcaggtccccgttctctccaagaaaccccagccagtctctgtgctccctcctcccatccactcccagggagccctcccctcacctgtgagcagaagcgcctgccagggatgtgcactctgtgaggaggggctgagggaggccccatgggctctgctgtctgctttgtcctcctctgtggagaggagcttgggcttcagaaaataaggaggccagaaagtaaggaacaggctgagaaataatggggatgtgtcgaaaggtcacagatgccaacatctttgtcctatgcaatattatccataaaattacaggtttgagatatgcttaaattttcttctaacatgcattaaaataaacatataacttttaatagttatattaaattgtatttaatataaattaaatgctcttgtcagagctactgtgactgtcagctctgctgtccttcctctctctgtgctaagcctcctcccagggcagaagcacttcccagggccaggggtgggggcggggaaaggtaagtggcaatgaggatctgcacaggtagcctttccgcctcctcccctctcagtcctgcctccttgtcttcttttcctctttttctccaatctacatttcagttccttagaccacgctgtgagaagcaaggcttattgggacccccatcccttaacaggatgacctgtgctccccataagtgacctctgctgtgtctagggattggctctgtcagcacctcacagagagtccctggggcccccaaactcagtgttattttctctatgacacagaaacccctctgggtatgcaaggttttcctcatgttttctaatgtctgggaaggttggatttactcccagcagggaggtcacagagatgtccagggagtggggtcctagaaatggacaaatctagagctaaagcccaggtctacgattttcagttgtttttttctgcagtgctatgtgaccctaatttcctaggagtaactaaaatgcaaacctcagacatttgtagacattttatgatttttctctacagcttgtaccactgttattattatttgctttatgctttttcctaaataaatttactttacaaaacatccttgtcctagtagggtgcaggggctcacgtctgtgatctcagctgcttgagaggttgaggtgggtggattgcttgaggacgggaatttgagacaaaacatctttgtcctatgcaatattatccataaaattacaggtttgagatatgcttaaattttcttctaacatgtattaaaataaacatataacttttaatcatcatattaaattgtatttaatataaatttatatacaatacatttttatataataaattatatatataaatgtatatataatagtttttcttttttgagatggagtctggctctgtctcccaggctggagtgcagtggcacgatctcagctcactgcagcctccgccttctgggttcaaacgattctcctacctcagcctcccgagtagctgggattacaggcgcctgccgccacgcccagctaatttttgtacttttttagtagagatggggtttcgccatgttggccaggctggtctcaaacacctgacttcaggtgatatgccgcctcggcctcccaaagtgctgggattacaggcatgagccaccatgcctggcctatatattttatataattatataaagttttctataataaattttatataataatatataaaatggatatttatttaagataaagttattagttttatatatttacatatatttaggaataaatgtgttactgtgggagcccagtgcccaggcaggtagtcagtacatgatggttgtcattagggttaatactttggaattctggattttttcccaagagagtgtctacgctggaatattgggcttgtggctttctgctgatgtgcatgtgtgaagaagctacttccacttattaggacttgtgtatctgtctcgcagtttcactacctattttctcgtgatgttggtcaagtcgcctaacttttctgtgcctcatttacctaatttgtagaatatgggtaacagtacacaagtgtgagtgtgtatttcccaggactgaccactagagggcgtgaaggcaccggcacttactattacagcaatgggtgtagtagtgctcatggtcgtaaacatcattctcccatgaaaggaaccagggcttcctgggagaaataactgattccagggctggggccggaaagcacaagcggagcctggagcatctcgtgaggccagaaagtaaggagccggctgaaaaataatggagatctgtcgaaaggtcacagatgccaaccagaaggagctttgaatgaccaattttgagacaaaatgagcactataagaaataatgatagtaataaattccaacccataaatacccatgagttcctactaatataaataaataattgaatacataaatatataaggatgaagaaacagctttttcttacagcagaattccaattaatgaatgtagaaggaatgatcaaatagaaaatcactatttggctaacagcacagtcaattgtttgtaggcaagaattatcaatggactttaaatatgaatgggtaaaagtatgatgatgctacaactagtgagtaccaagggggaaaaaaaagtacgttgagaagaaacaggctacttccatattcccaaagtatcacttcaggagctacttattgattataatgggacaaatagtaacttacagtagagaaacctggcaacagagtctctccgaggtacaaaggctctcttcaggaaggaggtaaggggaaggaagaagaaaacactgtcctgcctcaattatttgctttccccattctcaagtgtacttcatagacattcaaagatatgtgttgatagtgtccacgatccacatggctctattatagtcatttattcacacatacattcagtgaggctttgagtgcctaatgtgtgcctgatatttgctagatggtggatgctgagaagatcaggtgtgctgctgtctctagggtgactgaatccacctgccccactttacagatgtggaaattaaagtgaaaaggatttataggattagttcactgtcacaaggtcactagccttaaagttacaggagtaaagcaagtttcctgacttgctagattttctgctgcaggtgctgacaatggtgagctccaataggagagaggacactcagagtgaagtgggagccctgaacaccctggattagccaagaggacatgccgggtccagctgtgaccgcacaaaggaccattggggatatttgtattctctttttcacttagagcttgaaatgaggaaaactaagtgcagaaaaccaagagtggaagatttttcacaaagcactggtaacatgcatcagaaaaccctgtgctgatgtctgtcacggtgtttctcactgaacggtaatagtctggctttgagtgtgttccctctacagcctggagttctgcgaggcagggaccaggtgtgattcatctttgtctctccagtgacagtacacagcaggctctgataaatatttcttacaaaataaaatggaataaaaagtagacatctgcacaggtgtgggatgactgagcagcagcagaagcaggaaaagtcagcgtccccagatcagctgatgtggtgttcggattctagataggggtgaggtgccaggatggggatgggggtcctgtggctctgctgccctgggggacacccctaggtttcacagtgcctgctgtggttgctgcactttgcttccccatgggaaagtgatcagagggtgtggggcttcaggtgaccccatgtgggaaatggccaagggaaggtggggtgggcggcacatggttttttttaaccaatatttgaaggtaggttgtatgaaaaggtgttaggcttatttcagcttatggggagtaggacagggattggtgagtgtgtatcaggtatattttggctcaggatggaaaagaactgtcacagtaacataaggtcttttgggaaattacatgtttactggcagagttcaggccagggctgggtgtctgaaaatacctgtcagggtcacttttatggttacaagggcagagcttggcttggaaccaggtttcttactaataccacatattaagtattataaaaactgtcctttgcaataggacattgctctatgatgcaggttgaggtccctctgtttaagtaattgtgggtggctgtgattctctcatctagtctgcgacttggacttcacctccatctgcagtccctctcctttgctgttgacactggtcagagttaagcgcatttactgacgatggtcacagggtggcagcactgcctctctggtattttctaaaacctcttcctggaactgagccagtctaagaggatgtcatgactaagaaaagggcactaatgaggtgaacagataattttttttttcttgtttctcctgtgaagtaacagagtggaggtgagcatggaataattgccttttagaaatggaagacaatggagagaagtgtttcgcaaaccttaatgtgttcacagatcccacacagatctttttattcaatacagattctgatttttctggtgaggcctgagattgtgcatgtctaaggagcttttggatgatgccattgctgctggttggcggaccacactttgagtagcaaggctcgaagatcatttagaggttaattctcactgcatctaatttatggatgaaaacaaaccaaggtccagagagagcatatacagcttgcctaacaaagccattccctaagtgcctgacttcttgcatttaaacccagggcttcagcctttgtccagttctcactccacacatcacacggtttgttcactgttgtgaacgacagttgtggcagcatctctttagtttaggaatccagagccccaatttcactaccctctttggtcttggctcatgctgtgacttcgaatagttttgcccttacttaaaatcttcagtggctcttttgtaatcacaagatcaagttcgaatatctctgtctagtgttcatggctttataacatatggtatctctttagtaaccttacctaacttccctgttttaaaattgtctcttgctgccatagccctccttgctccttcctgctccctaacaaactgtgttcacttctctctcagtggtagtgatgatggcatggcctctgatgttagactcatgtaacttctaatcccagatccaccaccaacattggcaagttgattcatctttctgaggataagcatcctcctctgaaataaacttagatggcggttgagaggggtaaataaaataacacacaaacccactctcatccctgagaccctcttcaaaactagcatataaaaatagctatttgaagaggttcagtgaaattcaaggtaacacagagaaggaattcagaatcctatcagataaatttaatagactgaaataatttttaaaaatcaggcagaaattctgtagctgaaaaattcaattgacaaaccgaagaatgcactaaatctttcaacagcagaattgatcaagcagaagaaagaatttgtgagcttgaagagataatatatgaaaactcagagtcagagagacaaaagaaaaaagaattaaaagaataatgcatgcctacaaggtttgattattaagctactcaaagagatacaagagaagggtgaaaaccaacataaagaaatgtaaaaaacaatcagaatataaatgaaaaattttctaaaatgctagctagtttttttttgagacaggctcttactctcatcacccatgctggagtgaagtggcacagtcatggctcactgcaggctcaacttcctgggctcagatgattctcccacattagccttccaagtagctaggactaaaggcgtgtgccaccaggccaggctaattttttgtatttttagtagagatggggttttgccatcttacccagggctggtcttgaactcctgggctcaagtgatccaggagattcactgccaaaaaggatataaccaagtcatatagtcataggttatctaaagtcaatgtgaaggcaagaattctaagagcagtgagacaaaagcatcaattaacttataaaggaaaacctatcagtctaacaccagatttctcatcagaaaccttacaaaccagaaggtattggggtcctaatcttttggcttcttaaacagaatagctctcagccaagaatcttgtgtagagtgaaattatatttcaaaatgaaagagagaaatacagtctttttcaggcaagcaaatgcttcaggatttgtcacggctagaccatcctacatggaatgttaaagggacttctaaatcacaaaacaaaagatttaaatagaacagaatagaacctcttgaaaccaaaaaattcaaatggcctataaaacaataacacaataagaaaacaaagtagataacgatcaacatgatgactggaacaaatattaacattgaatgtaaatgacctaacactccacttaaaagacacagattggcaagataaataaaaaatcacaaaccaaatatcagctgtcttcaagagactcacttaacatgtaaggattcttatagactcaaggtaaagagatgataaaagatattccatgcaaatggaaaccataagtgagaaggaatagctatccttatatcatataaaacagactttaagcaacaacagtaagaaaaagacaaataaggcaactatataatgataaaaggatcaatcaaacaagaagatattacaatcctaaatatatatgcacctaactttggagctcccacattcataaaacggttatgatgagacctaagaaaaaagatcaacacaaaacagtgagggtgtcctgggttttctttttattggacagcagtgtactagcctatcactttcccagtcaggggatttttggtctccccattcccctaccatgggttcatgccaaagtccatattttttattagtgtttggaattggattttttttttttgaggtggagtctcgctctgttgcctaggctggagtgtagtggcacgatctcggctcactaacctctgcctcctgggttcaagcaattcttctgcctcagcctcctgagtacctgggactacaggtgcatgccaccacacccagctaatttttgtatttttagtagaaacgagatttcaccatattgtccaggcttgtatagaactcctgacctcatgtgacagggaaacaggcactcagtgaacttcatgcgattgaggagttaatgataatgagagaagggctgtgaggggacagcactggggacaccagagcctgtgacgggctgagttgctgtgccttgggagatgcccttttgactgagccctgggaaggagggggtgtgggggcaggagctgcctgcagagggagtggcctcaggtgggcggccacctggctgcagggaagaggtgacagagttcgtgtgcagagcttggagggtgaggaggaggtgggttgaggtgaccttggtgagggtgaaccatggggggctgtgggccctgctgagggaggccagccagccctggacctacagggtggtttggtcttttttgtcccattcccagcatccactgagtggtgaaactctgcaggccagggaccatcccactggccagaaggagcgcacagtaggtgcccactcagtgcatgttgggctggacagaacctcactctgccccctgcccccagctttgggagctgcagcaaggtccctccccctagggatctccatgcctctgtctctgaggggtgagatggggagacttcaaagggccatctcagagtgtgggggatagagacgcagaagtgtgggggatagagggaggcctgggctctagacccaaaggaccttacacacctcctgagtcttttcaaatggtttcttctgttactttaaaaatgatgtaagtcatcatatttattgtaaatcccaggaatctaatcatgcgtaaaataaggtgtcttatccttgaccccaccccttccccaattaaatttccaggatgttaccactgtttgcagttggtgtgaatctctctttaataatactctgtttatctcacttgtcgttttacgccaaaatacccattgaattatattattgctgaagaccattcttttttttttttttttttttgagatggattcttgctctgttgcccaggctggagtgcaatggtgtgatctcggctcactgcaacctctgcctcctgggttcaagtgattctcctgcctcagcctcctgagtttctgggattacaggtgcacaccaccacacctggctaatttttgtatttttagtaaagacagggtttcaccatgttggtcaggctggtctcgaactcctgacctcatgatccaccctccttggcctcccaaaatgctgggattacaggcatgagccaccacacctgcccagaccattctgttctactgaatcatgtgtggtgggcacctcttatatcaatacatatggattttatcttgtgtttgttattggctcccctttttctcattgcatggctacactcaatgctttgtccacacccctgttcctgggttggaatcttgtgacagaaaatgaagtaacaaaggctaaagctttctaaagtggagtcaggagattgcaagacaattgcactttcaccagcaagagctcaaaccacagaatgttccaatagatttggataaacagctgaagtcagtattcaccagccttcaacatctcaactaggagaaccctaaaattaactaagcacatagaatggaatggacttgtgatttaggattccttctcagccaatgagctgcttctgaaaacaactttttgtggaaattacctgtaaagaaaaccctctcctgtgcttgtcttacagaacactagtcagggctgccctgattcagtggacccgaattgctattatttgtttcctaaacatatggtattttctgtgaccttcatctcaatcttttttttaagttactgggctgtttcccagttttcataatgacgagacattctgcagtgtttcatacacatgtcttttccccatgtggagtattgatccaggagctcattcagtcaacgcatgtttatgaagcatcctgtgccaggctgtgggctggtcactgtcttcagcagagagaggacaggcacagtcttgccttcacagagctcacagctcagggaggctcttagaagtgggatactggtcggagcatgtgcacattaaacatgatgaggtcaaggttgctatagggactaaaccacagtcccaccaagatcgcattgagttcctgtggtagaccagaggtcagggcccctaagatgtcctgagcagctccctctgctcagaagttttggttccacaggtgacacacctgagcacaggtgacccctgcagaacctgtgattaccacccaaagccaagagtgagtggtgggtgttctaggaggaaccgtcacctccatgggcagggttggggaagactgaggggagcaggtggctgatgactttggccagaaggtagggggatgggcaggtgtgcgctcatagggaagggaagagaagggagggcattgcaggcaacaacacaaaggttggaacctgccttcatggactgagaaaagcagggagtccacccaggctgcagctggggagggaagacatggggagcagtgggtctaggggagaagcagactgcgattgaccttggggactgggcagtgagcagaggtgtgttatgtgtgtctgtccccatcatagatatgaggaggggtgaggccgcgggtggcacctgggtcggtgggatttcatagtgcctgctgttccctagagcctctctgtatagagggtcagaatagatctgaggctgtggtctgggggaaggggctggtggtgcttaccatctctaggggtgggaggagagggatgaggatgcccctgagcagtgaagcctcaaggtgtgtggagccacagttgtctctcattagacatgtgttttgcgtgaggatgccagggcctggtggttattactgttgtcaagtttgcatgacaaggacccaggtatccagggatccagagcacagggcccctggtgaggggatgaggctcagatggggctgaccaggttcatgtggtcagagtgggagggactgatggagagacagagcctcaacccctcctgtcaggagctgtggctatgtccaggagagatgacaaggatgacccaggacattgagtgagtcattgagacattgaaggtgaggacagggcagagaggaccctggtgactgctgaaatgtaggatgtgaggagggctctgacccatgcaagttacaggacctccccacccccgagcccacagatgacccttaaattgggcatcctgagtgctgtgtgtgcccagcagggacactggataggctggacctgagtctctgtaagggcagcgctggtctgtaggaccagagtcttctctgtgggtgtgacgtgggcaggaattagcaagatgggggtgacaaggcttggcttggaggatctggtacagaagcccatgggcttggtcagctcagcttctcaggggctcagctggggctggaggagcaggatgctgtgctcagggcatgctccaggcagcgtgatgtgtgtggttccagggtcaggcacgggggtcaaaaattaaccatgaaaagttcccaccttctgtaggcagagaaaatggcctgattgtcagggtcagggagacttaccatgtggccaaagcaggctctcagcctcccagagaccacaccctgggtgcagcactcagctctgcagggtatggcaatagatgtgccaagaaccccaacatccagatgcatgcaaaaattttgcgatatataaaatagagcagatcaagtttccctgcaataacgttgttcctggttgtgtctttttcttgtaaactagacatggacatctttccagcagtctgttctcatctgccaccttcctgctgcagcacctcagaatgaacattcctgagacactgtccgtggtgctgacgaccaagagctatggaacagagtgtgatgtagaatcttctagttacctctgctctcctttcacttttaacaacagagcatcattaacaatgagaaggtggagaggtgttcaggatcttgaagtgacttctgtcttgctctcccataaccctgaagctgctgtagacattattgcagaaactgacaccacagtcaggatggccttgtccaggagcccatgtgcagtttgtagtgagcaaggatgagaaaatggtcttgaaaggggtgatggacagaacaggggcttttcaaaaatgtcacatcatcacccccagcatccgtgaatctgtcacatggtaagagaccttacagattaaatgaaggattatgagtttggaagattattgtagtttatccagatgggtccaacataatcacagaatcccttccttacaaatgagagagggaggtgggagagtcagagaaggaggaggagatgtggggatagatgcagaagacagagcggtgtcaagatgctgcactgctggctttgaagatggagaaagaggacacagccaaggatgcaggaggcctctaggaggtggaaaaggagaggaaacgcactctgccctggagcctccagaaagaacgcagccatgtgggcaccttggttcaagtttctgtgtcacttagcttgtgggaatttgtcacagcctcaacaggaacctacagaggagtcaccttgtgtgcaggtgggatccagggtcatttacagctaaatcctgatgtaaatattgcaggttgcttttcctacttcctatctcatggccaacaaccctggacaatggcagaacacccttggaaaccacggctctgtgctttagtggagggaccagcttgtttgtgggaaggtagcacctggtccaagtgaacctacatgagatcgttactctccccagggccctcagggaagggctgagaacagctggcccaggtgtgtggaggagctgcaggtgaggcagggctggaggggcctgtgggtccaggtagaggggcagacaggttgtcccatcgccatgggagcctgcacgagctttaggttggggaaccctgctcctctgacctggacgctcctgtgtggagaggaggcttgctcagtgagatccacgccagggggtaaattgggaactgatgggaaatgaggggctagagtcctgggtagtgcctgggaggaccttgctcaaggactgaattcttggtctgttcccaccttggttactctgacaacccctctctgtgtcccacggggataaagatctcctgagcagtggccattgggacagaggagaacctggtggccagagctaagcatccaggatcctggatttggggacaggcaagctcattgctgggggacagtgatagatacggcctccagggcctgggtgaagagagcaggagggctcaggacactggaggctgtgtggaggtcacacccacgatctgtaccacccatggatgctcctgcattgctcacctttgtgtggacatcagatggccccaacttttgcactcctgagacatctcatgcattcacagagggacccaggctggggctgtgcatggccttggtctctagggtagtgtgaggacagctgagcactcagctggctgggcaggactcctgcgaatcctgccctttcctgtgtagggtccaccccagcctgactcctaaccccctactcctgtctttccagggaagagagactggggttgagataaggtggagatatttttcctgtgtgacccaggagagaatggacatggagtttcaggtgagtttctgctaagttcccatgagcagaaaaagagccaatgagaggaagtttcccctttattcagatcctttccaggtgaccccgggtgggccataggcccattcactttccctgcaagcccccgcttcctgtggtgatgggaagccttcgccttggcccacccagagcccggggcagtctgttgaggtctctatatattcagcagggacccccatcccttcctgtccccaggcctgtgtctcctcaggactcagagctggttctctggctcaggctccatgtccttccccatccccagggctgggggcttcagggacgctccatcaacccacaggagcagctcccagaggaacctaagaagccacatctgctttgtggtcgatccagcagtaaatgtttgtgtcagagtgtagcaattccagtaaaaacagagaagaggtcttgacccctgaggccttctcagaacagggtctggcatctctctctgggcccacccagggctactctgggactgaacctggctgtgctcagggggttcctgctcccaggcccctccctcctctgctcaccacctcctgttattttcactgcagtttcctgaacttcagctcagccagatgccagtggggacagatcctgggtctccctggggcccaagggaccagaatatctgtggcccccactcacctcatagatgagagcagctgccctggtgctgggtaggggaatctgggcaggggagagaggggtgtcaggggacagggaaggattcctgctgtgtaggaattccagggctctcctcaggtgatggagggtcccagggtggggttagcacagggagtggatgatcctggccctgaacagaggcccagctcatggccagggcaggtctaaccttatccaagtcattctgggtagggtgggtttgtgctggggattgacagtccccctgccctgagcctgcacagctggggccccagtggaaatgggattgggaacggacagtcttacctaggagatggagctgtcagagggtccatggcctggggacagagacaaaagtgagcacgagagtgttaggatagctgggcccctcctgcaagagtgtgtgggggtcctcagttcttagagaattggggagagggagcctttctcaggttattttaggggtcaagtaagcaagtgaggttgaggaagtgacccatgacccagagcccggaggttagggctgacccggccagttggggtttcctgtgtgatgttttatgggatcctctttgcagccccagggatagggtcagaggcccctgggtgtaactggcaggagtggacaacttggggctggcttagtagttcccagccacacccagactgaagggacactcaccgggggtggaggctgggggctgctgctccctgaagtcactctgatcgctggccctaggaaaggtcagggttatttgtgaaggtgcaaggttaaaagtcacaaattggagttaaaataggggaccaggaaaggagcctatttccaagaggggtatggagacctcctttctttatggagttctgtggtaggaggggcccaggtgaggggagttgaggaaaggccttacaaagccacatctgtcctggccagaggggaaggactctcaggcagatgctgggccaggagaacattgatccagtgacacaggaaagggactgaggacccagggaaggaatcagaccaccaggggttgcctgagaggaagggtcaaggcaccagggggaaagcagggccaggcacatgtgcaggacactgaggggactgcatgcatcttggattctcctggaactcagtgtccctgctgtgaccagacactccactcagggctggagatgctgaaatgggacaatgatcttgtcttctgtctctgccctttggcaagagacataaacgacattccaggatatgccatattggggccccggttctcccttctcacagctcagtgtctgcagttaccatgtcagtcaaaggggtgctgaccccacccagcccgtccaggctgttccagtctccactatgtgataatgcccaggatcccccctcagatgccctctcactgggtggatggattcagtgaacagggggaggtaccaggtattgagcaccgctcccccctgctccaggcagctgtggctttgctgtgctaggaaactaggaccatgctcaggggcatggccttaattggactgaattcactgaggacaaagctgttgaggaagcagcccagggtcagcagctggtgaggaaggtgccatggaatgagagggaaggatccctggggagtcgggaggctggggagagcctggcactgaatacaagacagggtctccttccttctcgcctggggtcagcgtgaaggatgggagcagaatggggaaaagctgtggtacctgccagtttttcggaggagcaggaaacacacaagtgcagccaccagaagactcccaaccaggaccccgatcaggatgcctagagtgttgtcatctgctgaaagaagaaggcaaaggggatgaggtccaaatctgttccagggggaaccatgaggggccttgcagggcaggggcatggtcagggaggaaggaaatgccatggagcctgagtgtggtctgttgtgctgtcctcatagctggctcccttgctctccgtggttgcaccattttctgtgtcttaggcttgaattactgggatgcatcaactcctacattctcccacaggaagcctgcacctcatcctgctcctgtgttttttagtccctccttcctctcacatcactcctcttccccctgtttctttttttccatcccatggcagtcgtaaagggcaggcccttgctgccaactcaatgctgatgagcagggatgatgttcattgactgttttcaggggccttccacatggaaggcacagtgggaatcaatctacctgcagcttttctcaccctcccattgccttgagggagaagggtatgtgatattgtgaaatacgtatttggtgttcatcaccattgatatggttaggctctgtatccccacccaaatctcaccttgaattgtaataatccccatgtgttatgggagggaccttgtgggaggtaattgaatcatgagggtgggttttttccatcctgttcttgtgatagtgaataagtctcaggagatcagatggtttcataaagggaagcttccctacacatgtcctcttgcctgctgccatgtaagacatgcctttcaccttccatcatgattgtgagacctctccagccatgtggaattgtgaatcaattaaacctctttcttcatacattaccaagtctcaggtatgtcttcattagcagtgtgagaatggactaatacagtaaattggtaccagctagtggagtgctgctataaagatacctgaaaatgtggaagtgactttggaactgggtaacaggcagaggttggaacagtttggagggctcagaagaagacacaggaaaaaagtttgaaacttcctagagacttgttgaatggttttgattaaaacgctgatagtgatatggacaataaagtccaagctgaggtggtctcagacagagatgaggaacttcttgggaactggaacaaaggtgactcttgttatactctagaaaagagattggtggtattttgcccctgccctagagatctgcagaactttgaacttgagggaaatgatttagggcaactggtggaaaaaaaattctaagcagcaaagtgttcaagatgtgacttgggtactgttaaaaacactcagttttatgtatttacaaaggtatggtttggaattggaacttatgtttaaaagggaagcagagcataaaagtttggaaaatttgcagcctgatgatgcaatagaaaagaaaaatccattttctgaggagaaattcaagccagctgcagaaatgtgcataaacaatgaagagcaaaatgttaatccccaagacaatggcaaaaatgtctccagggcatgtcagagaccttcctggaagccccttccatcacaggactggaggcctaggaggaaaaaatgtttcctgggccaggcccagggctcccctgctgtgtgcggcctagagacttggtgccctgcatcccagccactccagccatggctaaagagggccaaggtacagctggggccatggcttcagagggtgcaagccccaaaccttggcagcttccatgtggtgttgagcctgcaggtgcacagaagtcaaggattgaggtttgggaaccttcgcctagatttcagaggatgtatgaaaatgcttggatgtccaggtgaaagtttgctgcagaagcagagccctcatggagaacctctgctagggaagtgttgaagggaaatgtggggttggaaccccgacacagagtccctactggggcactgcctaatggagctgtgagaagaagaccacaatcctccagaccccagaatggtagatccactaacagcttgcaccatgcacctagaaaagctgcagacactcaacgccagcctatgaaagcagccaggagtggggctgtaccctgcaaagccacaggggtggagcccaaggctatgggagttcagctcttgcatcagtgtgacctggatgtgagacatggatacaaaggagatcatttcagagcattaagatttggctgccctgctggattttgggcttgcatggggcctgtagcccctttgttttggccagtttctcccatttggaatgggtgtatttacccagtgcctgtacacccattatatctaggaagtaactaagcttgcttttgattttacaggcttataggtggaagggacttgccttgtctcagatgaaactttggacttggacttttgggttaatgctggaatgagttaagactttggggaactgttggaaggcatgattagttttgaaatgtgaggacatgagatttgggaggggtcgggtggaatgacatggtttggctcttcttcacccaaatatcaccttgaattttaataatccccacgtgttgggggaaggacccagtgggaggtaactgaatcatgggggtggattcttcccatgctgttctcatgatagtgaataagtctcacaagatctgatggttttagaaaggggagttcctctacacatgccctcttgcctgccgccatgtaagacatgccttttgccttctgccatgatttcaaggcctccccagctatgtggaactgtaagtcaattaaacctcatttttaaaaaaattacccagtctcaggtatgtctttatcagcagccaagaccagctcggtcgcggagatcctaacccagcagtgctagaggaattaaagacacacatagaaatatagaggtgtgaagtgggaaatcagggttctcacaggcttcagagctgagagccccaaacagagatttacccacatatttaataacagcaaaccagtcattagcattgtttctatagatattaaattaactaaaagtatcccttatgggaaaccaagggatgggccgaattaaaggaataggttgggctagttaactgcaacaggaacacgcccttaagatgcagattgctcatgctattgtttgtggcttaagaacgcctttaagcggttttccaccctgggtgggacaggtattccttgccctcattcctgtaaacccataaccttccagcttgggcattagggccattatgaacatgttacagtgctgcagagattttgtttatgaccagttttggggccagtttatggccagattttggggggcttgctcccaacagactaatacacccattttctggtatgtgactctaaagtccttagaatcttcaaagtgatgtctttttcaagctaataattgactgatgactggcagcccctaggcaacttcagaatgaggctggtcactgacccaggtaggattagagggttgggactttcagcctcacccctaatccctggggagggacctggagtttgaattaatcaccaatgaccaatgaatcaattaatggccaatgattgaatcaattaatggccaatgattaaatcaatcatatctatgtcatgaaccccaaaaggactgggtttgaagagctgaacccatggaagtttctggagtgtggtgcatctggggagggcatggaagctccacaccccttcccacatgccatgctctgtgcatctcttcatctgcatcctttgtaaagtcctttattacaaaccggtaagcctaagtatgtgtttccctgagtcctgagagctgtttgagcaaactaatccaacccaaacagggagtcatggaaacctcaatgtgaagccagtcataagaagctctggaggcccagacttgtgactggtgggaaggtggtggcaattttgtgggactgagccctctgctgatatgtccaggtagatagtgtcaggatggaattggaggacacctagctgatgtacggtgcagaactgattggctgctgggtgtgtgggagaaacccccccgcatcacatttggtcacagaagtgtgtctgtgttgatgattgttattgtggagtgagagcagaggaaaaacacagtttgagtttttccaaacagggtggaatcccatctgccaatttagaatctgaaacttatagtttcagtacttcaattaagattgaagtacttcaattcagtacttcaattaagattcagtacttcaattaagattcagtacttcaattaagattacagaactggtaagtgaaagtgatacaacaaaaatgtaaccaaagtctgctcaacttaacagctaataacaacaaagttcataaaaataataccagtcgatattgatagcactgattgagccctggctctgtgcatgaccttgttaagggctttaatcgcattaatctctgaataaatatcctcacaaccaccctgagatccaggtgtttgtaacaattctacagatgaggaaactgaggcccaggaggttgagtgtcttgcccaaggtcaaatacctggtacctattgtaaccaggatgataactggatgagtctaatccctgagttcttacccacattgctccccaggctctgaaggaatctcatccttctcattccgtgtatcattttacaccccccctccctcctaggaaaatatacaaggaaaggagtgagaggggccgagggtcactcacattttacagtcagcttgagggggtcgctcctgttggagctgactgggttggagacctcacactgatactccccagcgtcctcctgcctgatggggtctatggtgagcatatggttaaaccaggacagcttcatcctcttcgtgacctgcagacgctggttgttgaaaatccactggaaagaggttccagtgttatttgtgtggcaggtcaggaccacggagcccttctctgtgactgtggtgctgctggcttggatggagggctgagccactgactctgtggatagagtgaccaacagaaagtgtcttggggccatgctgcatcctcagagatctcagagtcaaatttagaacattctcctgtgaataaaggagaaagatgaaggacagggaggagcagagagaaccagagacacccatagcagcgagcagtagggactacagtgacctcagagaccccagggaccaggaggacccagctgcctcagaccaggaccagggagccctgaaaaccctcccacagatgagcggccccagagtcacatgagatgcaatacctggggtggctttaggagcaggcagtcagagaaatggaacatgggtctcagcccctaagggacaaggaagaggtgtggccagctcctcctaggatcctacatccaggacccagtctgtaaagaggttatgattattcctttcttttttcattaattccctccctccttcatcagagaactactgagtgtgtgtctcagttgggccttgtgcaggtacagggtgtagtgggaagagaaagctgagtcctttccttcatcctcccatgggagtgacatcaacaaatcaagaaattcatgatttcacgtccagtgagggaagaaatgtggatctgatgggagaggcttggacaatcctggcattgagtctgatagttgagacaggtgatttcgttctaagtaaaaactgactaattctccatttgcccgtcattcctcagaccagaatctccctctctgagctgaggatgcccaagaagaaaggagctgaaccaacatctggtcctggggtccacagatgccccacggtggtggccacgaccagattctgggctgcagacacacggtggtgtgacgttgagcactgacagcctgtgtgatgctgatgcaatttctctttaataaaatggggtaaatgtcaatggtccctggcttgccatcctctctgtaaattaacattaaaatatttacaattacctgacctaaagcttggcacagaatagctccaaataaacatcatctattattattttactccaaaaaaaaaaaaaaaagagttctctgggcctgattcctggtggagaaggagcggtccagagtgtcttttctctgctttccctcctcctgaggacagtgcacttcccgggacatcttttaagtttcccatccagtttaatggcctgggaagtttgtttgtctgtcctctccactctgactctcaggtgaaagatgaggctctgcccttgcccagatggggctctgggggctgagccctgcctggtgaccagctctaggaaccacggccctgggacagctggtaaatcgttgctcacaatcagccctgcccaggaagccacaacccagccctggcacaggctccccagggtcatctggagtcaggatcttgggacaggggcctggggcaggggcttgaagggctgagcttctctcagaggatcctcaggccaggccctgactgagtcctataagatctttctcaggtcatgtctatgaggaggaggccaagcggggttggactgagactgattttcccccgctgcatctcccgcatcagactatccttcttgctgtagggaatttccacggagtccggataagggaaaggaattctgatctgttatagtttgtctcccctgggtgtgtcctgcactaaatgcccaaaccccaacatgggacgtaatgcagagggggatgcaggcacagcccaggcctgacaatcctgcgtatgtgaagcagaactgacccccaacacccagaggcacggaggaatcactcaccgtatacacggagatggtgagatgcctgttcaatctgagaatttctgtatgtgacttgtagggtgtagtatcccgtgtcctctagggtgacgttctggaaatgcagatctccactgggtgatattgtctctcgaccgctgtatgcaggccctggagtcctaacgtgagtgtctattacatatgctgcgattagctggttgggctccaccgttttccctttgtaccagccatagctgtaaagattctcgggcagataaaccacagagagatgaacattctccccttcagcaacttcaaagggcgctgatgcaataaagagccaggcagtggtgggtgcgttccagaaagttaaaagtgaggctaggaaagggagagaatatcagtcaatatttgacctatgcattggcatggaaagacggggtcctgggtgcaggtctcttcacccctcagccttagagggtgtgtgtgtgtgtgtgtgtcctactgggtcaaagtcagcagcatgaccctcattccttcagtacctctgaccttggcatttccttgtgtgaaccctctttcccaggggtctgcatggttccctccccactgccttcagttcctactcacacaagggaatccctgggagacttctttcgtgaagcctcctctagagaccctgggtcttccctttctgacctttcccagctctgttccctccagggctcttgtcagcacctgacctcacattctagatctctttgggtgtctgtcttcccccccatgagattgtgagctctgtgagggcatggacttgagtgatgttagttgcaccccagtgcctgggacaggctgcagactcctgtggatgagttcatgagcgttcccagggccttccatatcctggggtttatttgctaatgtctgaggttggcagatgaagacagagtttcatgccctggtggtgtttttatttaaattgtcactgtgatatagttttactatcattttcaaaatgtagtggccactgacaatgaacttgaaaacatggaccaactgagattgttttgccccttggcaattccagttcacttagattttttggttctccttagacgctctctcccctgagtctctaacaaaagccctctgtctcctctcagagccccatcctccccaggagaccccagccagtctctgtgctccctcctcccacccactcccagggagtcctcccctcacctgtgagcaagagcccctgccaggggatgcattctctgtggggacaagctgaggggggccccatggtctctgctgcctgctctgtcctcctctgtggagaggagcttgggctccaggaacgctctagacagggttactgtgactgttgtctctgctgtccttccttcctctatgctgagcttcctctcaggcaggagcacttcccgtttatgggcaagggcggggctctgcctacaatgtctctctgtcccctcccctctcagtcctgcctcccttgtccctcctttctccttcctttttgcctatatttggttccctaggcaaaactttgagaagcaacgctgatggggtcctcataacaggacgacccactctccccagtactgacctctgctgtgttctggccttggttctgtcacagccggtagattatttccctttgtgacacacaaaaccagctgggccctgggtctcctcatgctctccagtgctccaggaaggcagaatgatgcccagcaggaaagtgacagaggtggctctgggggctagaaaggggctcactgggtgatggctgggaaggacccacccgctatcttcagtgtcaccagcctggcctctgacccagggacagagacccaggcctggaggtctcgggaggatccccagctcctaggtgtggagggaggtgtcctgtgtgtcctgggaagagaggactttgatggaaggaggtgggaggctctgggttctgctgtccttggtgaaggtttcagggggaccctctccatgtctggggtctgtgcccccagcttaactctcattctctttgcaaatacatatattttgtggatctgcagttgcctgaactgtctcatgtccctaaatctttgtatccctttttacagaaggtcaggaagggtgtgtacatgagtatgaggactatctgatcagggcgagtgtttgtttcccaaagatctctttagatatggtataatacataagataaatgtactgaattagcaattttaagtgtagaattaaatgatactaattctattcacaatgttgtacaaccatcaccataattttttaccagaaaatcttcattataccaaatggaaacttcatacttttaatcaataactccccacttccccctgccccacccactggtagcctctgatactatcaatctctgtgaatttgcctagtttacatgtctcatataataaggaattatatacgtgtattatttttttctggattatttctcttagggtaacacttttaagattcatccacgtcgtagcatatattacagcttctttcctatttatggctgagtaatatcccaatatatgtttatacctcaattttaattcattcatctcttaatggacatgtgggtggtttccacatttttgctattgtgaaaaccgctgcaatgaacttacacttggaagtatctgtttgggtttctgtgttcatttctttgggggtacatataggagtataaatatggggtcatgtggtagttctatgtttaagtttttgagaaacagccaaactgttttccagtttgctgtgctattttatattcccatcagcaatatacgagggttccattttctctacattcttgtaaacacttactatttaatattttttaaaacttatagccattctagtaggtgtgaagtgatagctcattgcagttttgattttcatttccctggtggctgatgaagttgagcattttttcatgtatttactgacaattttaatattttttagagaactatttattcaaatcatttgctgtttaaaaaaaatgggttatctttttattattcagttgtaatagttctttatatattttagatacaagtcccttatggggtacatgatttgcaaaatttttctcatattctgtgtcttctcactttcttcatggtgttctttgaagcacaaacatttttaactttgatgaagttcacttatctatttttaattttgttacttatgctcttgatgtcatattgaagaaaccattgcccaatccaagatcattaagttttactcctatatgttcttctaatggtttgataagttttgctattccatttaggtttttgaaacattttgagttaacttttgtatgggctgtgaggtaggggtctaactacactatctcgcatgtggttatccagttgttccagcacaatatgaagaggctaccattctttccccattgaggaatcttggcacccatgtcaaaaaccaatgggctgtaatggtgagggtttatttctggactcttgattctattccattgatctctatgtgcattcttgtgccagaagcacactgttttaatgattgtagtgttttagtaagttttcaaattaggaagtgagtcctccaatttttttttccagattgttttggccattctggggtgacttttaaaaaagatgtagttcaatggttctcaaagcaggagtggttcagctctccttttttggcagtctggagacctttttaggaccttaatctaagtagataaattattcccactttcttttctgagttgctatgttacagtgtatattgacacccatgaaataattgagagaccctggaagtgcttgcctacatagtgagggacaattagttccatgatcatgggcacagaagattttgttttgggaaacaattttgttggtggagttatattcatgcttactcttttatttgtcttcatagcctgcatctccttcagacttcatatctgtttattttcttgtttgtcctctggggtttgggtgttgggtgaccagtcagctggagctggaggaggtgcttagcaaggcagtgaccctggttgggaggagcagggctcagcagggtgaaagtagctgggccttgagtcaggagtggcatctggaaggcctgactgtaagggtcagaagggccagcaggtgggtgtcctaggcacaaacggtggctgctgctgtggactggaggaaggtaagaggccccgagtattccatgttcttactggctccccaactgaggattcctctcctgggctggtgctgtcctgcagcagggaggggttagacagggacggctgcacatcaggccggagtccatgtcatcctcttaggcactgtcactacagattgaggattctgttcataagccaagcctttgcacaaggaagggacccgggctctcaaggaagagcagctcctggtcagacctccatctccttctctctcattgcctgaggcctcaagcttggtctacctggcacaggggtctggatcctcctcccagggttggggtcttactgagctgggcacctgcaggtgggagaagatctggaggggccccatctgccttcaccagattgatgttgagggtccctgagtcctgcaccactatcaggtgctgagcaacttccagtgtcagtgacaaccaccccatggtggaagcagaaccacctcgtgagaaagcacctccaagcctcagtgcttgccatgtgtgggaatttgctggtttcagttgggggcatgttggtgggtggtcatgaattcagggccggattctatgctcacagtgcacatgctggatgtggtacagaccccaggcagggctcagtggggtggttttgggtgtgcacaggtatcttttctggaggagctggtggtgatttggctcccagaagttcctgagctctgcagactcaccaagcactcaatatttgagtgaacattgggcgagagagcagaaggtaagtgtcagggcatcggggttggtgcctctgggaagaggaggaacattctgggaacaaagctctcccccggcttacagggagcttcccatcgctcctgccttgaggatcagggaaactagggcctctgctcttccaggggctgcttgcaggcagtttgctctgggagggggtgacccaggagttgcctctcattttgcatttgagatttaaaaggagaagggacagtatatcttgccaggtcacaaaaattacaggcatcatattgactgaagggcactcctgtcatcactgcaatataccagaatggtcttttaaaaaaataagtgatttaggtttaccagcaactgtaatgcttgttttattcttctagttcaccgttaatgtcacttttgtagttttagcactggcaatgttgattttatgttgactctgatgattttaagctttcatttgttcacatagagatcatcttctttctgaatattaatgcattttttctctatttctactggttattcctgtacatagagtagagaatcacttttcccaaggaggtggaaagcttctgactaccaaaaaaaaaaaaaagtgtcaaaatgctttaaagtcagtaacttaaagatcaaatccaagagtgggcaacagattctgcccagggtctgaaaggtggagaggtgactggtgaggatgtttaaaagacctctcctctctactccctaaatgggggccatccagtgttcttgaggttcagagaaggcccagggctggggcagcagggcactgtcagctcccagctcccaggggccaggagtaagaccccaacactgtccagacactgattgcattcattttgggggagagtagattcttatttaaagaataatacaaaagtctacaaatatgaacataaacagaaattcctttgctacaattttccccttaataagacattccttcctaatgacatatgtgactgcattcatggctgagatgttttctaggatggtgagagcatcagagtggactatctggtgccttggggtcatgcattttcttcttccaatgtctacaggatcccccatgtcccactttgtagtgtaactcagtgtgtgtcattctggtttttgttgtatagatccttggaaagcccatgtcattcctgctgtgaggtacaggcagccaaatggcatcatctctaaacatgccttctcctggtacatcaaattatggaataaatgaaagccattttgacagatattgaagatataagtttctactcttcccacacatgcttctcccaagtgaaggattttactggtgaattgttattagagattagtgtggatcagtgactctgccaggggaaattttgccctctaggggacatttggcaaagtctggaaacattgttggttgtcagagctgggggagggagtcctgctggcattgagtgggtggatggtgctgaacaccctgcagttcacagagccccaccagtttgaccacccaaatgtcaatgctgaggagtggagagccctgctgtgccctcccgcagcttccctgaagcttcccctcacctgctcctcccatgtctccccaccacttccccacttcacccgcctccttacacctcagtcccctccacctgaactcaccccttagtccaaggccagccctgatctccgctctcctggtctccttgctccttagcaggaggcgcccactagatggcgcccttgcccttactggagctcaccgtctccctttccaccctgagacaaatgtggctgcttttactgccacaaccccagccctccacactctagatttgctcagggagcagctcctggacagacctcagggaccccagggaggagcctcactctggagattttgatggcatggtctttgaacttcactgttacccccagtcaggatccaggatgttgggagtgcatgattctgcccggtcccacttcagcaggaccccactgctgagttgtctgtggggacccgggcctctcatctccttcttgcattgcaggagagggatcttagcactgctttcacataaagtcagataatggaggagtgcaggtgagtttgggaaggtggacatgaagagaggttgtgtccctagaggtggcagcagtgagaggatgggcaggtgggaggaacacagcccatccagggttgccagccatattaggagcgacagcctttcctctaagcctccagcctttttcctgaaacattccagaactttccacttcagcacttcccactgaggctcctcaggtctgtccctgagctcccagctgagcctacctacccatctgaaatcctgagtcctgtgtcaccctcgttccccattattctgtgcagttctgtgggacgcccagctctcctgacacccccagtcttcagaatggccatcagcgctgtcgctgtggcaccagggtgactgccgcctggaggctgagtcctggcttcctgacagctgtggggcccgctctaggctcccttgtcctgatcattcatcacctccaggatgcacagcagctgggccagggggaggagcagggacaggtgtcagccaccctgtgtgtctgcaagtcaggctgggggtgtgggaggacgccaggaatgactgaactttctgatttagagggtgagagcttgcactgatggaatttgggatttaataggaaaagcatagcgttttcctattttgtaggcagggtggctggagtttggaatcatagattcccctgggatgtcactgtggacctcagtcccacccgttaggggcacagatttcagaatccacaccctggggcaaagcaggcatgggaggctccatcagcctggccagggctctctatttgtgcagctgctgcaaggagatgtgcactctgatgggaacagtgctccctcctccttggggggcagtatctagctccctgcagcccctctccctgcaggccctgccctctctgaacctcaccttccccaacccgccccccgcaatcccatctcagctgtaatcccaacactttctcatccattatgggtggactgcttgagcccaggggttcaagactatgctggctggacaatatagcgagttgttgtctctacaaaaagacaaaaattagctgtgcatggtggcatacacctgtagtcccagtcactcaggaggctgaggtgggaggattgcttgagctggggaggctgagttggcagtgagttgagattgtgccactgtatacttcagtgtaggtaacagagcgagaccctgtctcaaaaaataaaagtaaaaaaaaaaaaagaaatatggaatacattattgttaactctaatcaaccatgctatgcaatagtccaccagtaataccagtaatagccaataatgaattatctgaaaaagaatacaatttattcttagctatctactgctaaaatttttaagctatcttttatgatagctgaaacaaaagaagtaaatttaaccaaggaagtaaaagacctttataatgaaaactgtaaaacattgatgaaataaattgaaaaagacacacgcacaaatagaagatattccatgttcatgaattggaagaactgatattgctaaaatgtccttaccacccaaagtggtctacagattcaatgcaatttctgtcaaaacaccaatgatattcttcgaagaagtagaagatcctaaaattagaaaccacaaaaattcctaaaacctgcacaaaacaccctgagttgccaaagcaatcttaaacaaatagaacaaagctagtggcattacacttcctgacaatcaaagcatactgcaaagctatagtaaccaaatcagcatggtcctggcataaaaacaagcacatagatcaatgaaacagaataaaaatcccagaaataaacccatgcatctctagctaactgattttcagccaaggagccacatgcacacaatggggaaaggacagcctcttcaataagtggtgctggggaattggatattcatatgcagaagaatgaacctagaccctatccctcaccatgcacaaaaaattaactcaaaatgtattaaataaagacttaaatgtaagaactgaaactatgaaactactagaagaaaatatagggggaaaatccatgacattggtctaggcaaagagtttttggataaaatctcaacagcataagcaacaaaaccaaatataaacaaacgggatttcatcaaactaaaaagcttttatacagcaaagaaaaaaaaggccagcagagcaaagagacaacctacaaatgggaggagaatatatttgtaaatatatacatatatatttgtaaatatatacatctgataagaagataatatccaaaatatataagaaaattatgtttctgtatagttttatctgactgggatacagaggccacatccacagtcccatcctcaaaggccacttgttcccaaaatgtcaagcacatccctcaatgatccatcatcaacacctatgtctgtaggatgaagggtgaatcatgaagcactaaaaaggaagaaggaagccaatcccaaaacaaaatgatgcagggtctggaaagtccaaagcattttttttttttttttactgcatcttcctcctttcttctccacattcccaatcctcactattgattaacaaaacaaaaaaaactgggacccaccatcttccctactgtcaggagatctagcgagattgtttgagtcttagaccaaactttgccataagccaaatttctggctgactttacaatgatatgagctagcacagtctctttttctgccagtcaacttgtgctcggttttatttgcaaccaaatagaggtggtaaccaaatataggtgaccctaaaattagtcatcaggatgaaatcctaaaatgtgcaacaaactgggttgaattcaggattagtagcaacatctctgttgtgggcttgaaaagggggcacccttttatgcagtagcaaaattgctaaattgttgtttgctgagtctttggactctcatcccggattttctatgaccattcaaacagggctgcaatgaacatctatggttgtttagcttggcacacttctacatttctatatagtaatatctagaagtgcatttgctcaatcacaagatatgcacattttataattgactgctatcgaactaccttaaatagccttaatttgttctcaacattgtttaacagggtctgtttaatgtcctacgtccagcaaggacagtatcacttttcttaatatttttcaaattattggaccttaacaaatacttaatgtgcaattaattgattcctttgtattcccatgccttcttttatatgtttccttatagtacacaaaaccacattattgtttctttacttgtgtcattccaccctggaccattcctatctaaactataacattatgagagagagagagagagaaaacaatatgaaaatataaattgattaatcaaaaaaatttaaataggacaaatcaggaagacacaagagagattttaaaattattcagagaataccacaatagctgtaccaatatattttaaaacttagatgaaacggacaactatctcgataaatgtaaattaccaaaactgactcatgaaaaaatggatattatgaatagagcaataatcagtaaagcaattaaaaagacagttgataatttttatttactgacaacaataacaaaatttcaggtcctgatatttttatggtgaattttaacaaattttcaagctcctcctcaaccaattctcagaaggtttaaaactttaacaagaaaacactttctaacacattttcagaagctgttatagcatgataccaaaaccacacaagaaaattatagaccaatctcacttacaaatatacatgcaaaatcaaacaaaatcttagtgaaccaaattcagaattaataatagcaaacaagcaaaatatgttatcatacgtatggcttatatcaggaatgcaagtatgtttcaacatcagaaaatacttctccacattaacagactaaaggagaaaaacgcttgtttaattatctcaataggtttttagagaattttgaaaattttataaagttatgcgtattctgtaaaattgatgaaatccaaccttgatttatttttaaaaattgcctttcctatagaattataggtaaaggaaacacatgcatcctcacagagctacttcaaggctaagttacttcccataagtaacgtatcctgtaatgtgtgcttggcacatattcaatactaaacaaatatttgcaaatcctcaaaccacttctcgctcaaataacccacctttgtcttttgcctttatgttagggttgattttctcaattgtatcttggagatcctttggtgggtctttcagcaattaccctgaatttgcttttctgtttacaattttaattcctgggaactctttcttgttctctgactgcacccttttcatgagagttcagccatcaatcctccagaaccccaccccccccgcccccccaaaaagcaataaagatgtctaaaagcttccttctgggctttcgaatgatgtttaccccaggcatttgttctattcgttcatcacccattttccctacaacttgcctacacttgatatcagatttttatttattagtcacctatcttcttcattggcccattttcctattttgccactggttgttctcaaatgtgttatgattcctggttgtacagtcaagtggttgataatcttggatatacgataaagatttgctctgtagctgtgtgtaagcctatataaaagcttttgtatttttcttcttaaaaaagacaaaagatggttgggaagatccctccagttcaccagttcgaggctgcagtgagctatgatagcgccgctgctctagcctgtctgtctgtgaaaaacaaggggggcggggggcgggggggaagactggagatgtaaatctcccgcagggccctacccgtatccgcaacaggtctctaacaggaacagcctcaggcctgtgttggaacaaggtaggttacagaaatctggaagccagatctgtaacttcagggtaaggactggctctcagggctgatcccccgggctgggtgtcccagaggcacccgcccccgccccttccccaaggcaggccaggacaccttcactcctctccttaggctccccacccccttctcctccccactgtgcctcctggagtagcggtggcggtgccacaggggagcggggcggggcgggctctgagggcaagggggatgggccccgccggggtcactggcggccaccctggaaactcgacgcaggccggcccttctagtgaatcgtcccagccacagctggcctcccagccgcgcttggggcgcctcggggcgcgaatggtgcaggttggggagactcaccacgcaccgtcgggggtcggtccggttattcctcaccgctcggctccagtgggcgcgcgggcctctcctcctcagttcctgcgctgcagtccctccctcacccttcgcagcttgggaatccaactgtgtcattccgacggagcgccgtgaggacctccgagggtgttagcgccaagtgatctctgtccagcgctctgaatatccaagtaaaggagttcaatgaagggcgggtcaacggaggagaaaccgtgactctctcaagggagcccaaggcctccttgtctaattagtgacgcgccaatggatggaggctcttcccaccatctcttcccagcatccagtgacaccaccgccaagggacgggctcggcggaacctgcaggaaagaagcatcggctgagcctgactgcagcgctgtgaagagacaggggaggggatcagtagttggtcccgcgcccaccccctgtttccgcgaggggcggagttgactggccatgcaggcagagggcgaaatgtgaaattccactactcctaccgtttttccctgacccgatggggcggagtgtcgtcaggctaagttccctggcggtaaggtggggagattgaggcgcacacctgccgaacggtaacgcaggattagctaaggcgagctcaggacagaagcctcccgaggagcaggagggcaaaataataaataaataaataaataataaataactcactccttggtctttatttgcggcaggaattcagaaggtgaaagcggggccttaggatctttctgaccttttgggttttaagcaggaggtgtcagaaatgttaccacagggctagctggcttgtggccagcaagcgttcacaatgccctcgatttttcatccctctctgtgggttctttttttcattgtaaggcagaatttctacgattgctcacccactcagagaacctgagctggtttagaccaggtgagacaggctaggtttaccctggtgatgatgtgttgttgccatggcgatcctgcccagtaccagaggccctgcagattcagatgcttggtgcctgtgcttggctgaggggccaatgggtgaagctgccatctgcgggatgatgactgaagcctctaagtcagaatccgcccaggctgagccttagggcagctccatggagcctcggctggcctgggatagagagtccaccactgtgccagcccccagccactgcctaggtcctgtgctgagagccccttgtccagggaaatggcgtccagtggaaaagggaccacccccttgcccttcactcaaggcaggttggtgacaaccctgaagctaatccgttcctagaggagctgcttctgggtccgagttttctctgcagcagagcagctccctggatgggatctgttcaaagtccgcctttcacgcggaattttccgtccttgcaattttccacctccaccactaggggatcctctctgaccgcctcatgccggctctggcctctgagcaggggtttctcttctgcatgtgcgaccttgcgcatgcctagtggccttttgggacctagagctgctccacaccccgatggggttacagagtgcctcgcctccactccaccccaccagggttccttccctggctgggatgggatttcagaagcgccgaggaacagcccagacaggtgtgggagagtagccaaggcccctgtcccggggtggccaggacagcggtggcctcgcataggacctggctgggctgctgcaatcagtgtcctgccccttggagagcaacagtgaaaacaacaagactatcttcacccaccttaagaaagaacagaaccagtatccccaactctgctgtgtatcccaacccaattccattccccaccccactctcagtagccaatatgcaaaatattagaatactcttactgttattattttcaaccacactctgcatcctgaaaaaccatatatttcgttatgtgcttttaaacttcttgaaaatgaaatactgaggctgggcgcagtggctgacacctgtaatcccagcacttcgggaggcggaggcaggcggatcacgaggtcaggagatcgagaccatcctggctaacacagtgaaaccccatctctactaaaaatacaaaaaattagccgggcgtggtggcgggcgcctgtagtcccagctacttgggaggctgaggcaggagaacggcgtgaacccgggaggtggagcttgcactgagccgagatcgcgccactgcactccagcctgggcgacagcgccagactctgtctccaaaaaaaaaaagaaaaaagaaatactgaattttcaaatacttgctttttttttcggtcaaaattatgttctcaaatttcactcctgtagatgtgcgtggctggctgtagtttttgcatttttattattaggtattctcctgttgcattaatatgccacattttatttctctcatgtttttggtgaccacttggggtgttttttggttttgtatttttgctgtatacatgctgccatggtggacatacctctttatacatatttcctgttgtatgcagacacaattttaggatgtgacatcttcagcttttctattgtgtcgtgtgtcttttccttcgtgctttgtgttatttacatattctggacacagattctttgtcaactgtatgtgctgcacatctctttcccagtttgtgtcttcttcttcttttttttttcttaaaaaaaactttctttatagtgttttttttttctttctttctttgttttgttttgtttttttgagatggagtcttgctctgtcacctaggctgaagtgcactggccgatctcggctcactgcaacctccgtctcctgggttcaagtgattctcctgcctcagcttcccaagtagctgggattacaggtgcctgtcaccacacccagctaatttttgtatttttagtacagatggggtttcaccatgtttgtcaggctggtctcgaactcctgacctcaggtgatccaccctctttggcctcccaaagtgttgggattacaggcgtgagccacagcacctggcctgtgttctttcttaagtagatgttacttttaatataatagaatgtatcatattttgcttttatattagtactttttctatctaattcaaacacatccccaagggtctttgtgtgtagactgaccaatttctcaagaatcatgaatgaatactgcttctctttccccaatttatctgtaatgctacctttattataaagtttctatgcatgtgtagaaatagttcctgatttttcactctgtgccaccagcataccaatagcacgctgtcttaaatattaaatagcagagctttatgagacaacttgatgtgcagtaggcaattgcccccttgttactcttcttcagggttctttgttgtaccacatgaattttagaattggcttgtccagctaaaagacaactgcaaggattttatttggaagttcataattctatacataatttggggaaagtattttcataataccaagtcttcctattaatgaacacagactctctctctctctcccccacccccacctgtttagttatttatatctttatggtctgttagttattgtttattgtctttcaaccaggtttcatgtttttctacatagaggccttgcatgtgaaagtctttcttcctagcttgctattacaaattttttttaattgcactttttgggtacagtggcttgtactgtaatccccgatacctgggaggctgaggcagatggattgcttgagtccagaagttcaagaccagcctgggcaacataatgaggtccctgtctcaaaaagtttgttttaaaaattgcatttgctgttattcaacaaatgtcattgtgtctcatatatggatttttatatctgataaccttgttcaacaatcttttgattctaacaatatatcagattcttttgagttttccatatagacaataatgtcatctgtaaattataattgtttcttctttgttatttcttggaccttttattttatatttttgtcttgctgcaaggcaatatccctctatatattgtggggtcttttttctcataaagtggggatggtgaacacccttgtcttgctctctgattgtataaagcatgctttctgtagcattttgtagacgctcttttttagattgaggtaattcacttttatttctggtttactgagtttttagcataaattcaggctgaatttgagctaaagctttttctggagacatcatttgaaaaattcatatgatttactttctttaagtcaccaaagttatgatttacattgaactgagtttctactgtttaactgtattcttgggagaaaacccacttgtcactgaacaatatctgttttatttactgctgtcttgtgtctaaattttcttttaggattttttgtatatgctcagattagcctgttattctcctttctgtatttttttctggtttgggggtcaaagttataatagcctcacaataagagctaagaaaccagccctaatggaggccggggcaggaggtttggagttcaagaccagtctgggcaaaatagtgagacccccatctctatgaaaaatagaaattagccaggcatggcagtgagtacctgtagtcctaggtacttgggagggtgaggcaggaggattgcttgagcctaggaatttgaggctgcagcgaactatgattgtgccactgtactccagcctggatgacagagcgagaccctgtctcaaaagaaaaaaaaagaagaaataaaaaggaaaagataaaagagctaagcatctgtttccttttttccattttctgggagagtatgtgtaagactgtaattaactgtttcttgaataatgggagaactctgtaaaataatctggctttggtgttacctgtattggaaggatgaaaaataccaattcagtttcattattggttgatagggctactcatgctttttgttttgttttgttttgttttgtttttgagaggaagtctctctgtattgccctgttgtccaggctgagatgcaacgttgttcacaggcctgatcctggctcactacagcttctaacttccgatctcaatagatcctcccgcctcagccttcccagtagctaggactacaagcatgcagcatcacatccagcctcttttcctgcctgacccagttctggtttcctttagttttctaggtgttcatccattttatctaatgtttaatgcatttggcataagggtgctcagtgtcctttcattgtctgttgtctgtaactgttgccattttcattcctatttatgagtactggcgtcttctctcactttttcttaataatcctgctggaactttgctttttaaagaacatcttttgacttgttgattcttttttcatacatattaactattttcttattttttgcctttatatttatttcttttcctgtttgaaacattgctcttttcttactataaaaatgggtaagtagctcatgaattaccacctcttttaaaaatcttttctactgtaagcattttagcagtttacatttgcccacaagtaccacttcagctacaccctatgtgcttttacataaagtcttcatttttggtaagacatattctcaaattttaattatcacttgtttttaaatccatgatgttttatttgaaatgttgtttctaaagatacattttctggttatacttttattcttctaatttagcacagtggccacaaaacatggtctgtgcagtgcatacaatcgatgagtaatttctgagctgtagtatttggcataatatatggcaaaatttcctaagttttccatgtgtgctttaaaaaacttccagtaaaatacataaatctgttagatcaagcttctcacattgttcaaatagtctatatgtttactgattcatttgactgcttgatttatcaattacaggtaggaatgtattcaaatctcctattaaagtgtgacactcaagtggctttttaaagacagagatgccaaaccaatgaatacatgattttccccaaagcctgcacaaattctctaatgaaattttaccatgaaagtttgtttaattaaggcttactaaagcagtatgttgtcttttactttttaaacagagaatatatattttaatacatcgtttaagtttatgattaattatctattactgaggataagaatctttgcctgtgctcattcagcatttgcacttcatttatgatctgccttctcatagcttctgttaatttttatactagagacatttatttgtttgtataaatgttgaaggtttttttttgttgttgttgtttttgagtcagagcctcgctctgtcacccaggctggagtgcagtggcatgatctcggctcactgcagcctccatctcctgggttaaagtgattctcctgcctcagcctccagagtagctgggactacaggcatgtgccaccaagcaaggctaatattttgtatttttagtagagatggggtttcgtcctgttagccagggtggtctcgatctcctgacctcatgatctacctgcctcggcctcccaaagtgctaggattacaggtgtgagccaccgtgcccagctgggttttttatattataaggagatgtaatagatagatagatgtttcaaagatagtcaaatgtttttaaaatttaaaacacttttttacaggttgactttcaccatttaatttcatctatgtgttttgccttagagaaattttaaatgctatgtagatctcatgacttataattatgaagcattttgttttctgttttccacgaaacttagcttaactttgagcatataatagttgtaaaggtaggagagtaacactgaaaaaaggaattgcataaaaatggcacattttctgtagagttgtttatcgcctgaaaataggccccatttcatggaagtaagatgatcaggctcaggtccccagacgaaactcttggcatggtttttggagatagtccagggctcagtactggctctatcatttgctacttctcccaaagtaaccaatatctcatccaccctgagcccatttccatatctctaacatgaggataatagcatctaccttacacaccaagtagagggatcaaatgtaggaactaaatcaaagtaccagcactgaataacctacatcctcccacttcccaaaaggaagagagatgtatcccctgttgacaaacgagaccattttgcaggagagaaaggaaatgccagttcacttgcaatgtaaacatgctctctctttttagggatgtccagggacctgagagagaacccatgcttaccaaagagtttctagttccagacacacaggactcgaagggtgacaagtatggttttcagggtccctgaatccacccagtcctcacagaaactcctaaaagctgtcgattgacagcgttgagttcacagctctggtcctcacatgctgatactgcttgtgatatcgaacccgacaggaccccacatcacaattgatttaccaactacaatataatacctcctgaatctccaaattggctcacccaggaacaaaggcttggggtaaaactggattaggagatataagctctgaattttctgagggtgagacacacaaggattctaagtgacacgccacagagtaacgggtctgtgactggaggacccacagatttgtcttactggagacaccacatgcacacaaactccatccttagctgtggaaacaagggtcttttgctatcttagccgaattctgggagtaatttttggaggggaggagatctttgggattgcctctttcaggccctttacaaaaatacctacttcttaaatggtaaagcttacactaaactgaaaaaattacatccttggctttttatgaagtaggtgttggattgaatcactactggaagaagtatggcatcgcaaattctaagcagtggtcaaaggatggatctgttaaattagaaaaatctctaaatttataaaaagattttagattcctttattctaaacaattgacctatttgtactcatgggacaatcaaatttcaaaggagatatgtaacgatttcatggcttgcattaaaaatccttctgataaaattaaagataaaaaatctgaccccctgccaaaaaaatcttttgaagttcatactgcctgctttcaatattctgtgggattcacaatgaaaggtgccttatattgtggcctagcttcaagtttatgccttcgccaccatggcctgggttcaattcccagtcagggccccagcgcctttggtttaatgtttgcgtggcatttgacttttttacctatttagtattggtgagattacctttggtaaaaaaaagtttaaagagtggaaatcgcaattctttgtgttggctaaaatctgattataagagatctggaaggttttatttttctttttcaaagagctctatggtcagaagtcggcttcatgaaaagctaatatttaattatatgtacatacagtctttctggattttctcttttgcctcctgttttgaaaaatatttggatttgagtgaaactccgttttagaaattaattgcttggtacaatatacccatgtaactaccctgcacatgtaccccctgaatctataataagagttgaaattttgacaaaataaaattagattttgaattaaaacaaataggtgcttggttcctctgctcacttctttttaaaaggaattcctctcccatgtacttcttcttttcccttctttaccttccttttggcatctttggtatcacatgaagggatctagagggaattttaagtgactctgaaattccttgagaaatacacaaaaagatcccactcaccccttttgggggtctcctgttctccttgtggagtccagagtcagggacaggctcctccaggtctgcagctctgctctcttttatttcatcttggctgattgctttggttttgtgagtaccaggcattactttgtactgtgagagacacgtcctttgtgagtgcaacggctgctgggtcactggtgagggctgcagtttggagatggctgagagccgttgcaataaatggttgtgattgcagggggctccttgtttctttgcaagtttagatgagaaaggtgcagtttggacacagtttaaaggctgtgaaaacaccaccaatgaatatgatttcctttggggatggtctgattaaaagtgggctgattgttgctgtgctactagccttgaagacatgtttctacagcattgtgcagtgtggaaaaattgtgtggcttggtcttgtggcatgtcccttcttttagagacctcagattcaatgtgaaattcgggatttttgattttcaaagatctagatgccctgccttccagatgtgcctactcttcacatattttaaaattagatcctataaactgcaaatactttgttggcttctgtgagatcagaggtccagttagaaaaggaagacagtttgttaaaattaaaaactatttatctaatctaactagattggcctccaaatatgactttctgacattcagctggttactctgaaaagatttctaaatctcttgaggctcatctatatgtttccttgcaaagaaaaaaaaaaaaaaaaaaaagcaagcccaagcactagtaagaaaaagatttgcaatgtttcatgaaaggagtagatgagtgaagcatttatttgtagatactgggttggatacctgtgcaaagaagaagaggtcaataataaaaattgccaggggatttcttggaacttaacaagctgaattaaatatagaaatgtcaggaaatcaaggcaggaaatactcacttgtggttaggcagacagggcagggttctgagcttgagatggagcaaacagttgtggtgggtgaagttcacatgctttagagctcagctgtcctagtaaagaagcctaagagtctctaaagctcttatgagaagatggattttttttgcctagattaaaaggttaaagaattgctttaagttggataaaataaagctaaatgtttaagcaagttgtgaaaggtttatgaaaaaattaattaaaatatttttgtgtgtaaacatattgactaaagttgaaggggtataattcagcatttctgtaaattgagcattgaaataaaaacacaatgggtttctcttagagcactaacctgctctttaacaaaaattgtaaagggttatagaaagtctataaaaatgttaccttatggtcaaacattaaaattgggtaaatatgtctatcaggttttattaagaattaggtttaacattaatagtacactaatgtaaaggtgaaatttggcttatttggtacaaaaatcatacaggaagcattgtgaaatataaaatgatttttagctttctttgggctatatttctataaatatgttattgatgagggttccaaagttatgggagactcctataattctgctatatctcagtgtacattatcagtcataattataattgtcatgttaaattattgtgggccacagaggtaacagatttccttgtcaattgtgtctttgactatgactaccctaaaacgttcagtcacccatatacacatgttaccttgttttggccctctttagaaggtaattttataatcagctataaagccctaacaggtgctcttaaatgcaaattttgataactttggagattgtgacatcagaagagaggaaaaatgttcgggacacttggagagctaaaatgttcattgatatcaagcaggacaggaattaactgcatgaagtgaactaataggaggctgaagtgatctttttgactttttgcttaaaacgttgctgatcctttgttttgcttttcagagtcaaggcaaattttcttttgagctattgacagcttttaacgattaatcaaaatatactcctatgaacaccatttggagcattatttgtttctctctacccgatttccccagaatttggaaactatttgtgggtattcttaatttatggcaatatagttatttgcataagtgcaataagaatgtgttttctttggtaacaggacacaatttgaaaaactggttattttaccaaggttttgaccagaatgctgtgctttcctttaaggaatcaaacttgacttgtggagctaataaagcctttggaaaactgaccttatatcctgtgaacacagtccctgtacagggttactgatctgtgggaagaaaagaatgtcacattctgacaggtcaggaatcccaagttatcttgaaacttcaagaggacaggaattcacccaaccatatgtatttgatggtagaaatccatggcaggggctcagctttaaaaagtcttatctcagattccttctataaaacaaagtcccattaaaaccaattttaaaagcctatgtgaaaaataattattcttgctgcacctcgtacaaataaagtggcaaagcataataaagcaaattggtcctgtcgtaatttgtctttagtaaaaacgggaaactggggtcgggtgcagtggctcactcctgtaatcccagcactttgggaggctgaggtgggcagatcatctgaggtcaggagttcaagaccagcctggccaacatggtgaaaccccatctctacaaaaatacaaaaatgagccgggcatgatggcgggtgcctgtaatcccagctactcaaggggctgaggcagggaagcggaggttacagtgagtcaagatcgtgccacttcacgacagcctgggtgacagagcaagactccatctcaacaacaacaacaaaaaagggtaactggagagagggaagttatgtttcaaaaacttttggaaactatagtacacctgtttttaaattctagtctggcattcagtttttattattttctacagtttgggttaaattcgtatttctctggctacaagtctcctaaataatcttttcatttgtttcctttttctttccctttttccccatttttcttaattggaaatcactgaaacctaagctgtgctttcttaaagccctgtgaactgaagactagacaaccgaaacttctgaaggaagtagcagcaacctatttatatgtgttgctgttgcctactattatgttttagcaggtgctgcctctacacccccgaaacagagagtgctactgggaacaaatcgactttttccactccagtgctgcattcggtgccccataacgatgaccccctctcagcaggaagtagccagaaagattacaatgctccatctccctatgattcttgtgataaataaatatacaagcatgatagaaatcatgcgcaaattgacagtggggattgtggcaggccagatttcactaatggaggtccccatcacaactacttcagtactgactgagtggttaagttcagtatcaaaagctgaaagtgccagcgcctttctacaaaggctagaatgtaacaaaagcccaccaagggttttacctaggcctttcctgggccttacagcatgacaaaacaaagaaggaattcttaaccagacctgtttaggattaaacaaatttaattgggggtctgaagaaactcgccaggcctccacaaacaagttcattgggggtctaaaggaaccccccccaaacctctgtgattgagcaggagacaaggtcagggtaattgccccagcacctggactcatttagatttaagtaaatgtactgaggctccagagaaaggtctccaagacttagactagagttacagattaaaagaagttaatcacttatatctttagataaatgcacactgacacgtagacatacatcttagaaaatatataagctctggaaaaccttgtaatttacagttggtctggagatattttctgggccttctctctgtaaccggttccagaaataaaaaactctcttcctccccagtttatctgcatctcgttattgggccgtgagaaatagcagccagaccctgagtttggtctgggaacacactggctgggcttcctgcctggcggtagagcttcactgtcctccttcccagccaaaatgtggcccttgaaggcttcctccccaactgaccggttttgggttctaggtactcagggaacaccgtcttcaaggaggccattttcatactgttcctggtttgatttttctgaaattaggaaatgccccttgaggcatccaggattgtctttatttcccctgaagcttcccctcctgaagaaaaaagttctcaaacaccctcaggactcaaaccccaagttcaccctgtgaaacattcccatttcctaaacccaggcaggctcatggccctcagcctctcagaccccatggaaacctcctcccccacttcacgggttctctccatattgagagcctcccctcctcggcacacaacccagagactcaccccaacatgtgtagcaaatcaccctggaaacaatcatggctgaacgtggtagcccatgcctgtaatcccagcactttgggaggcccaggaggtggatcacctgaggtcgggagttcgagaccagcgaggccaacatggtgaaacctcgactctactaaaaatacaaagttcactgggcattgtggtgtgtacctgtaatctcaactactcaggaggctgaggcaggagaatcacttaaacctgggagacagagattgcagagagccaagatcgcaccattacactccagcctgggcaagaagagtgaaactacatctaaaaaaaaaaaaaaaaaaaggaaaaggaaaagaaaaaaaaaatcatgaggcaacattgcatttaacaatattttatttatcaaaagacacttgtctttctcaggtaagtgaaggtctagagatgaaacgagtcccgatgtaaattgccccatgggcattgctgagatcacaagatcatcactgcagcatgcagcacaatagtaaatttctcaggatggaagttcaacaatccaaaaggtagtattttttttcatgatgctcagtccatcatacgaaataaaaataaattccttttcatgatcatccattcagtagaaaaaatgatagtaaatttgttctcatgaagatttttaccgtaacatataggatttatcgttattattattattctttgttttttgtttttttgaagcggagtctcactctgttacccagtctggagtgcagtcgtgcgatctgggcacactattaacctccacctccagggttcaagcatttctcctgcctcagcttcccgagtagctgggattacaggcatgcgccaccacacccggctaattttcgtatttttactagagatggggtttcaccgcattggtcgagctggatttgagctccggacctcgggtcatccgcccatctcagcctcccaaagtgctgggattacaggcgtgagccaccgcgcccggcctcaatttatcattattcacgcatccacaaactgggttcttatattttgtacgtgattttttccattgaggagagatatctgtgcatattcatgctgctcatatttcatccacaaactcggttcatatttcatccacaaacataattttttccgttgagaagagatacttgtacatatttatgctgttcaaattcacatttcatcattcttttacaagaaatagataatgtattttaaggttttccagtggtattacagatattttactgggtgtatagatagaaattaaaccaaacttctttgttctggccgccagtcatgcatcctgttttcaacatagttcacatacaactggttgtgtaaaaatgaaattattttgtttagtacaatcatcaacagttggttgattagatttttaattatcaagttaatcattgtcattatgcttctcatcgcactcgtcattaattgctgtgggaggaaatttgttatgttccctatgagagggtgtatcacaaattcaaataagaattcaacgacaatggactgtataaaggaaataagcaagtccatggaaaacatatttttttccggaaaggattaaaatatttttaaaaaggaattaaaaaaaaattgggcacggtggcaaatgcctagagtcccagctgctcaggagatggagacagaaggattgcttgagcccaggaataagttggaggctgtagtgaacagtgattccaccactgtactccagccagggcaatagagggaaaccctctttctaaaaagacaaaaagaaacaaaacaaaacaaaaaaacaccacatcaaaaaacccaacaacaaaatgaaaaaccaaataacagcaatacaattggagctattcgatccaaagaagtaaatgaaacataaagcaaataaaagagaaaagctaatacctgtgtcctgcaggactcagtccaagttctgctctgactccctcctggtgagccaccccttaaaaagtcacttggggcggggttactttgacagacagtcttctgtcaaagagggaggcggtaaatagcacttttttttttttaatttaacgcctttccaacaaattagcggctatgttgtctaagagtgcaaatgtcagaggtgggtacaggcagcaagaccctccccacaggggcagcagaaggaggaatgactaagggaacaagactttagtgtgctcaactacacaggacaggaaacagatgctttttacaaaagctggtggacttgaaggcagaatattttcaagttcctgtaactgcgaactatgacctgtagcctgtgagagtgactttctgtggcaaaggagcttttgtgaatgtgaggaagttaattatcttaacagtgggaggttctcccggcttatctagctagaccctcgtgaaatcccaagtgtccttaggaaggggaagcagagagagatttgagtccagaagaggaagaaggtgatgtgaggcccagtaggggaacaaagggcgatggcatgtaaacacttagcccccagaagtgggagagggctggggttcatcacaccagaatccctaacaatcagccttattttaattacccttgaaatggaaggaggccttagagagccagaggcttggaggggcaccctctgctgcatacacagatcccaactgctgtgggctccaaataattgcaccagggaaatcacaaattatcaaaaataaaggatgtaaagcttttaaaaaatattaaaagcccaacaaataaaaaaagttctaaatctataaaattgacctcagtctgtatatttagatgagtcatgtgtatatagcgtttcacttcaaaatatatgataaatctctcattcattggcttaaaaataaacacttcaatcaagtctttatcagaaaaattgaaacgttaactcaattgccttttagttcatgtgactttacaaaacttaaaacaataaagtcagttttaaaaattattagtaaagtaaaagaaaaatatcttcacaatgtagacattttgtccacatgagacatgtgaaatattgccattactaaatatttgcaggtcaaaaactgtttccaaaacattttaaataatcatctggcctgtctgttttagagcattcaattctagctgaggtctggggacatgtgaaaggagccacggcccgactccgtgctgggaagagtcagacattttccacagctctgtcctttgctgtgggctctgcaactcctaccaattaaaattgcttacgtttttgttttatttttactaaagaggggttcctaaaagctaacattatactgagtatatgtaactaaaactactaagaaaacaatttcacaattatacaaatgtgccaagtaaatgaaaaaataaactgtattttaataaaggttataaaaagaaaaacatatagtggtgtgaggactgtctcaggtcttcactgagcaagggatcatgacattctatggcggacagctgaccttggctttctgctcctcttgattatgtctactaagtgacatacttactctttttccacctgtcttgcctctaagggtaacaggttttatgagatccctcctagtgctttgcaggtcagcctccctttgctgcattccaattttactgcctataccctccagctggcttttgatgacaaaagtcctggtcccagccattctcagattctgtcatccccgtgggcactatggagctcagcactatgggaggttccccaaaaatctcgttttctatgaggaatggccaccacctgcatctcagtgatgctagtgacccctttcctactcctgtgctcactggtcctcatgaagatcctggttggtctgtagccccctatttttcctattaaagagaaattacagtaagacccatttgtgtgcaaaatcaattttaggcttattacacttggcctgataatttgcataaaatgcagcaagaattcatcggccatataggctacttttgagttaattttcctgggtttttacctaaaaatatactattttggttagagtcttgtgaaaataaccaatgtgttcaattgttttattttaaaaggctcttactgaacactataaatatgtataagttgaatatacaaactatattgtcataaaatcacaacccaaaatgtggagaacgcagagggaaaggtaaatttgctcgcaaaaacatacttcacccaaataactggaaaaaaaaaaagactttcatgacccttctttaaccagagcagcagctttcaaacaaggtgtttgccttggaaatgccattcacaagccaaacggcccttgagagctgtctgtcaggcactgtagaatctagcagctcctcacagagttagaaatagtttcaggaaagagattccctgcttttagtaactgcactttatattcccagatagcgagattgtatgtaaaccatttttatcttattctggaactcttttgggtactttttttttttttttttaaatgatggagtctggctctgttgctcaggctggggtgtagtggtgcgatttcagggtatgagaaaatgcagctggacctggctctttccaggaagaccctcacagccaaggagtccaaagcctggggttttcatctaattccagtgtgactggggtaggagcagctttggtgctgggtgtgtgtgtgtgtgtgtgtgtgtgtgtgtgtgtctatgcctgtgtctgtttagggtgttaggctcgtggttgtctagatacaaatgtcccagggctcaggagccccagggttatgtcaggggcaccagatgaaggtgtcaacagaagttagggcacaagggacaaaggtgagagcaaggttagattcatttaggtgcaagaaatcatagagggaggagggagaggaagccctcctgctaccaccgaggaagaagcgcagcttaaggcagaaagcctgtccggagaggaagtgagtttgagggcagggctctctgggtaaagtacggtctgggacaccagcctgggggaagggtacagaatgcagagtggcctggcgtggggactaagaacagaggagagcagctttcactgggagggtcagtgttttcagtgtccagcactgagcaaggtgagatttgggcagcttgctgtgaaataaggtcaggctctggcattgtccccattgcgtgtgtgtgtgaggggcactttgggagagtgaactctccacctccatcctctcatacgtccttcaaccgagcttgccagttaccctgattccaaggagatctatttattgttgacaatactggatcctagcagaggctgggtaggagcctgggcacaagcaagtggaggagggggcctgggcctgaaagacctgggaggtttgagagaggacacagcccacagaatggagcagatggggtagagtcggcaagcattcagggctcctagtaagttggacaatggagaccctgaaagatccagtaaaacggggagaacaaacaggtccccaactcacatccttgcagtgcctggagcttcagactccagacaggtggggaaggaaaattgagggatgtgaacatgttggagaatgtcgtgccctgaagaatgaagaaaaggggggtgaggaatgagagcaggaacggcttccagtgcctggtgcccaggagaactcagaaaatgggtgtggtggagaggaatcgaggaaccggaagtggtggaagtgtgcagggcccctccgagatcactgtgactgccaggcgtcctccctggctggagagcttcactgtcctccttcccagccaaaatgtgtcccttgaaagcttcctccccaatggactggttctgggtcctatatatttgaaggggtggcctgcctctccacacctgtgggtatttctagttgggtgggaggagagacagagaaaagaaataagacacagagacaaagtataaagaaacaacagtgggtccaggggaccagcactcagcacaccaagggcctgcaccggcaccggcctctgagtttcctcagtttttattgattattattttcattatttcagcaaaaaggaatgtagtaggagagcagggtgataataaggagaaggtcaatgaaaaacatgtgagcaaaagaatctatatcataattaagttcaagggaaagtactatgcctggacgtgcactcaggccagatttatgtttctctccacccaaacatctcagtggagtaaagaataacaaggcagtattactgcaaacatgtctcacctcccgccacagggcagcttttctcctatctcagagttgaacaaatgtacaattgggttttacaccgagacattcagttctgaggggcaagcaggagacagtggccttcctccatctcgactgcaagaggctttcctcttttactaatccacctcagcacagaccctttatgggtgttgggctgggggacagtcaggtccttctcatcccatgaggccatatttcagactatcacatggggagaaaccttggacaataccccgctttcaagggcagaggtccctgcggctttccacagtgtattgtgcccctggtttattgagactagagaatggcaatgacctttaccaagtatactgcttgtaaatattttgttaacaaggcacatcctgcacagccctaggtcccttaaaccttgatttcatacaacacatgtttttgtgagctccaagttgggtcaaagtggctgggtcaaagtggctggggcaaagctacaaattaacaacatctcagcaaagccattgttcaaagtacaggtctttttcaaaatggagtctcttatgtctttcctttctacatggacacagtgacagtctgatctctctttcctttccctacatatattcatggaccacagtcttcaaggagtccatttcctcactgtttttggtttgatttctctgaaattaggaaatgccccattgaggcacccaggattgtctttacttcccccagagcttccactcctgaggcaggagcttctcaaacaccccccaagactcaacacctaatttcaccctctgaaaccttcccatttcttaaatccaggcagggtcatggtccttagcccctcagatgctgtggagaccttctttccctttcatacattctctcaagattaaaagccacccctcctcagcacacaccccagagactcaccccaacatgcattgcaaatcaccctggaaacagtcataagaccacactcatttaataatattttatttatcaaaagacactctttctcaggtaagtgaagttctggagaggaaaagaggagtcctgatgtaaattgccctgcaggccttgctgagatcacaaggagattgttactgcagcttgtagcacaatagtaaatttcttctctggatggaagttcaacaatccagatcgtagtatattccttttcattatgctcagtccagcaaatgtgatgataacaaattccttttcatgatcatccattcagcagagaaaatgtttgtaaatgtgttttcatgaagatgtttaccataacatacaggatttaccattatcaatgcatccacaaactctgctgttgttttttatacataattttttccatcgagaagtgatagttgtacatattcatgctgttcatatttcaaccacaaactctgctggtttttttatacgtaattttttccattgagaagtgatacttgtacatatttgtgctgttcatatttcatgtttcatcatccttttacaataaataggttatattgtattttaagtttttctaactgtagtgcagaaattgtactgggtgtatacatagatatcaaaccaaatttacttgttctggctgataatgcatcatttatttcatagattatgtatttctttgacacatttcacgtacaactaattgcataaaaatgaattttcttttagtatagacatcagcatgtgcttaattcggaatttaattgttgagttaaacatcgtcattgccttttccgttgttattaattgctctggtgggaattttgttatctcatacataagacagtgtgccacaatatctcttaaaatttcaatggcaataaactttatatttaaaaacagggaatctatggaaaacacatttttttctaaaggattaaaatatttttttaaaataattttctaaaaagttaggcacggtagcaaacgtctagagtcccagctactcaggaggctgagacaggaggattgcttaagcctacgagttgggggctgcagtgaactgtgattgcaccactacattccagccagggcaatagaagttaaccctttttctaaaaaaaaaaaaaaaagaaagaaagaaagaaaaaaagcaacaacaccaaaacctcaccaacaaaatggtaaagaaaaaaaaaacagcaatacaatgtaagctatttgatccaaagaagtcaatgaaatttaaaacaaatgaaagggaaaaagtaatacttgagtcctgcaggactcagtccaagttctgctgtgcctccctcacggtgagccacccctttagaagtcacttgggtcataagttaacccgataggaagtgtcctggccaatgaactagggaggtggtaaatggcaccattttaaatttaaattcacggccttttcaacggatcagtagccatgttgggtaagagtgcaaatgtcagaggtgaaaagaggcagcaggaccctcccctagtgcttgggcaacagaaggtggaatcactaaggggacaagactttagcatgctcaagtacacaggacagaaaacatgctttttacaaaagctggtaaatatgaagagggaacattttcaagttcctgtaaccaagaactaccgcctgtaaccggtgaaagtgactttctatggcaaaagcgtttttgaaaaggtgaggaagttaaatatcttaatgttgggaggttcttctggtttatctggctagaccctaatggaatcccaagtgtccttatggagcggggagcagagagagagatttgagtccagacgaggaagaaggtgatgtgagtctgggtgcgggacagggggagaatgatgctatgtggggatctgggctggggaatgacttagctgcatgagcggagtgacttagactcctgaactagaagaaatctagggctcatcacctcagcagccctaaccatcaaccttatttttattacaggtcttccatcgacggactccctaaaaagccagcggcgtggaggggcgccctctattggacaaatagatcttgactactttcggccctcaaatagcctgactaggcaaataacaaataataataatttttttttaaatcatggaaaatattttaaaaaacaattaaaaagttataaatctataaaatctgcttctgtctgtgtgtctgtatatttagatgtctcatgtgtacataatgtttcactaccaaaatatatgatgaaaccctcattaatcggcttagaaaactaaacacctaaatattttctcagaaaatacaaaaactttaactcaaatcccttttaattcacctgactttaaaaatctttaaaaaataaagcatgctttaaaattattagtaaagtaaaattagaacatcttcagaatttagacatttggtttaaattatacaggtcaaatactgcccttagtaaatattttcaggtcataaacaactcctgtaatcttttaaataattgaattacatgtctgttttagagctttaagttctagctaaagcctggggacaaatgaagggcaccatgccccctctctgtgctggaaagagacattttctacagctctgacccttgcagtaggctttgcaactgctacctatcaaaattgcctacatcctaagtttattattaaaaggagttgcttggagttaacattataatgaatatatgtaactaaaactatttctcatacaaagtatatgaaaaagtagaatgtatttttaataaaaagttataaaaagacatgaacatgtagtttttataaaaaacagtaattttgtctagttttgcagttctaaaaagttatgttaaattcaaaaataaaaaataacaagacaagactcaaggtttaaataagttgtaaaagatttgtaaaaattagttctataaaaattttacaaaaaaaagcattggttaaaatttaaggaattattttgtttttacagaaattaaacattcattaaaaacactctgatacaaggccttaatttgggttcatgtatcagaatagcagggttttcttagaatattaatctattctttaaaagaactatgaatgttatgcaaactttataaaaatcttaccttagagtcaaactgattaaaattccatagattttacgtaaaattttattaaaaattaacttcaacaaaaataaaatttgattttctcctttaaacaaaagttttgcgtaatattaaataataaagcatttttgtttaccttttaaactataaacacacacacacatacacatacaccaacactaaagtcagctgacctcatactgtctttattggatattcttgtttaaaaaactatcttctttggaaaataaagttttttattttaaaccatattttaaattatcattttgactaaatccataacatacagtgatctgtaataattctattttataatatcaagtgttttgaagaactccaggaacagccatgagagaacactgtggtttagtaacactttatttcctcagtttgaaaatagttgtctttcttggggaggccggtttcagcagatgaaaacaagagtcatgatgaaaattacccagcagtggttagtgtgaccataggaacattgtcatcaggtcagcagaaaacatatcagcaaatttttctcatactggcagtgtgtaggggtggatgtttacagttcctgaagccccagtggtcgtgtggtcttttagttttgccatttataggcaacttgtggtaactagctcaattagacacattccttatcacaaggacagagggctttctgtatcctagggttcttgccttggcattccagaagaatcaggtcacacgtggacgtggagaatgagtgcaaggttttattgagtggaagtagctctcagcagatgggggagccagaaaggagattggtttctccctggattggggccgttcagcagccctggctctcctctgactgccccaggcaaaatccacatcgttctataagtcggtgccctgctggtgtgctggtgcctgttgtcatgttcctcttcatgtccagccgcctgtgtgttcctccgctgatgtgctcctctcgacgtcaagcctcctgtgtgtctgactgctagggtcttggggtttttataagcacaggatgggtcttagcaggccaggatgatcttgggaaagacaacattcggtcaggaaaacaaaaatgcctgttgtcatctaggtccgtggggacaagcccaggtgtggagcttttagccagggaccacagcctcctgtatccaacacttcccttcaccttttctatatcattcaaagggatcatgcccttcccatcccagcacttcactttcatgtcatttgccccctctgaagaggtacatctaactgccattagaatatggatgatgaccagtcttagctgcttcctgctgaaagggggcattgttttgggggaaaacggcagtcagattcctcccaggggtctctataataaaagatcgaggtggctactttcaggaggtcctctaatgtactatctggtcccaagtcccatttctgcaacctcctcctgatgtcaggagctgcctgagtaataattttatcctttaggattatctgtccctcgattgaattaggagatagagaggtgtgatttaccaaggcctctcttagcctctccaggaaggcagtgggattttcatcaaatccctggttaattatggacaacttagtataattgagaggcttggtcttagacctacgtaagccctctattatgcacacctgaaagtgtctcctcttccagtcttccatctcattattgggatcccatttagggtccttcactggtgctacttctcttccagttggataatattcgctcccttccctgatgctataggtgatgcaaagctcatccccaaatctctctgctgctggcagagcagcctgcttctcagtgtctatcaggttctgactcaaaagtaacataacgtctctccaggagagttcaaatgttagggtgaaattctggaaagcttctatatatctatcagggtcatctgaacacttgcccagatctcccttaatttgctttaagtcttgtagggaaaagaggacttggaccttactgggcccaaattcactgggcatctgtaggaggggcaagagtgagactgggcttgtttgggatgaagatttctaggaggggccaggtgagaggctgaagctggatacggaggttggggtggacccagaggagcagggcttgagggagctggcacgtcagctgggggtgcgtctgggactcgtgtctttaattccctgggcttgaccctggcagccttccccgagacagcaaacaggagggctggaacaatcctacatgtcagcaaaggtctggattgctttgcaaggtatagaaagcctgcacatttggggcctcagaccatgtgtcctcacatccagagaaaagttctaattgcaggatggtattgaaatgaatggtcccttcctgaagccaagccagtccttcctgtaaaccataatttggccaaacctatgtgcggagggctatgagatgcttttcctctggattctgagggtcaaaacagtcccaatggttcaggatacactcaaggggagtacaagctgggggtggtgaggagaactggctgcccattctgaaagacagggaatagaggtgttcctcatttcccttccttcttttggcaaaaagctcagggtgtgatggggagggaaagcaagcatcttcacttcactttccacctcttacccctgcgccctggcaaccttggcaggtgccggccacaggtacaaatgcggtatgtacccatgaagcagggagaacctggagattaggaattaactgccctcacctatgtttccttttctccctgctgttgaaaaactttgagttccctgggcctttttatcccatgaggcatggcctccttctgtgggatggggttcagtcagcaggaattggtcctgtccatttacattgtgcctgttgcctggctttgaattcctcagacctgctttctctttctagggcctcagcctgaagcttggaattgagtttgggactgaaaaagcatttcagaggctgtttatatccatttagtgcctcaaataagccctgctgaatttgcaattatcagccagcaggggtcactcctctgttaacttccctattagaaacagagcggtggggattctcacttagaaaagaaaaaaagagaaaaacagttaaagaggcaaaaagtggggaatgctgggggaagaaccccttgcttagtgcaagtgggcccctctaatccttataactttcccatccttcccccagttcagaccaggttgaattccttggccatggaaggaaaggttccattgatgcagtgggtgagaagcactctgtagggtcctggctaccatcggttttctcacacccccctcatcccaggcagtggagggagacacttctgcgacattgctccccctgccccttcatggctattgggtgtggcctttgcctgctgcaggcatgcctaggtgctggagctgggagggaaaagggtaaggagaggtgccctggaagccgctcatgcctggggctgtcaaggtggaggcatacatggcacctctaggaaaaattggtctgatttgcacctttggcggctgagccaaatgctcattttacttagtaacattgcctcagcctgtagcaaaactcttaacattataaaggaagagataagatccatttcaaataatgtgtgagagagaaaagagatgaaaggaaaacagagtcttttacctgcaggaaagggagagaagtggcagagttttggaagaaaggcaggcccaacagtttcccattcactcacactcaccttccgagatcccagacgagccaccagttgaaatgggaaaagtttccttgtccccctcacaggaggtggagtgggggtgtggcttgcttctttagtactccgctgctcaaacctctagggaagcatacagactggcaagttgtggggctacaaccccatggcagcatctaggggtagatgtttacagctgctgaagccccagtggacatgtggtaccatgtgctcttttagttttgccatctataggtggctttgtggtaaccagctcaattagacccattccttaacccaaagacagagggctttctgtatcccgcggttgttacctaggtgtaccagaaaaatcaaatcacacgtggtcttggagaatgagtgcaaggttttattgagtggaagtagctctcagcagatgggggagccaaaagggagaatagttttcccctgaagtcgggttattcagcggcccaggctctcctctggctgccccagccaaactctatgtcaatccattggtcggtggcctgccagagtgctggtgcctgttggtggattcctctcagcgtcgagagtttttccctctcaggaaagggagagaagtggcagccacccatgtgttcttgcactgatgtgctcctctcgacgtccaacctcctgtgtgtctgcctgctagggtcccagagtttttttaggcacaggatagggcatggtgggccagggtgatcttgggaaatgcaacatttggtcaggaaaacaaaaatgcctgtcctcatctaggtccaggggcacaagcccaggtttggagccctagccagggaccccggcctcctctacccatcactttccttcaccttttctgtatcattcaaagggaccatgcccttcccttcccagcacttctcttctgtatcaataggtgatgtttttaaaatttcccaactctagtgcaggcatggtactagacatatacatagaaataaaaccacacttattcttctggctggcaagacatagtatttttgccaaattatgtgttgttttgaagcattttatgtacccctggtcatataaaaataaagctattttgttcagtacaaacagcagcattttctggattagaaagttaatcatcttaaaagatcatcacggatttttccattgcactcatcactaattgctttggcaaaaaatttcttatctcacgcatgacaaaatcagccgcagtatctcctagtaatttaatggtgatgatctttataaaggaaataagcacatcaagggaaaacataattttttttaaaaaaagagtaataaaactttttaaaagtcttttttaaaagactgcttttctaaaatagtaaaataaaactccaccaataaaaccaccaacaaaacagaaaagaaaaaataatgatatgatcggagctatttgatgaaagatggtaaattaaatttaaaatgattagaagagaaaaagcaatacctgtctcccgtaggtctcagtccaggttctgctatgcctttctcctggtgagccacctatttaagagtcgcttaaagcatatgttaatccaacaacagcagattaaaaaccaatgcaatctgaactatttgatctaaaaacataaataaaatttaaaacaaataaaagagaaaaagcagtacctgtgtcctgtaggtctcagtccaagatctgctctgactcccttgtggtgagttagccctttagaagtcacttggggtggggcatatgttaattccactaacattggttctggccaatgagtcaggaaggtggtaaatggcaccttttcttcttgctgatttctttcagttcctttggagtctggacattagtcctttgtcagatgcctagtttgtgactactgtttcctatactgtgggttgtgtgtttaccctgctgatatttcttctgccttgcagaagattttcggtttcattaggtcctattgatcttattctatttttatatttttgcgtttgcttttggggcattagtcatgactacttggcctaagccaatgtctagaaaagctttttggatgctatcttgtagcatttttagactttcaggtcttagatggaagtttttatatgctttgttaaagatcaggtgactgaaagtaccgggctttgtttctcggttctctattctgttccattgctctatgtgcctatttttatacttcctgcaccatttattgaataaagtgtcctttccccaattagtgtttttgcatactttgttgaagattagttgtctgtaagcatttggctttatttctgggttctctattctgttccattgctctatgtgcctatttttatacttcctgcaccatttattgaataaagtatcctttccccaattaatgtttttgtgtactttgttgaagattagttgtctgtaagcatttggctttatttctgggttctctattctgttctattgctctatgtgcatattttataccagtatcatgctattttggtgattgtagccttgtagtataatttaaagcctgccttcagatttgttctttttgcaaagtattgctttggatatgcggtcacgtttttggttttgtataaattttaggattcttttttctagttctgggaaggagaatgatgatattttgatgagaattctactgctctgtagatggctttggagagtatggtcactttcacaatattgattctacctattcataagcttataatgtgttcccatttgtttgtgtcaactgtgatttctttcagcactattttgtagttttccttgtaggaaacttacattaacctacttggttaagtatatttctaagtattttacttattaaaaattctcagggaaatgcaaagtaaaactgaggtgggaaattaaagaaaaataaaattaaaaagaaagggaaataagctttcttgtattaagctaacttgtcccagaggcagcaacaggcacagcccagacccaggaaaagtcttgataatattatttattgtattctggagactcttccagcactccttcaatgtagggagaagaaaaacaaattttcctttgttttatggtatgagtttatagattcttgttctctttaactagtaacttcaagtattctgttttatctaagaagtatggcaaaggtcatgagaagcctgagcaggcctgaactacagctctctaggcaccatagtgaagataaaccaatgcaagcctctttagagcaaaacctagataatagacatctgggttgcatagcaacagttatgtgcaatcctgagttatgaacctgttacaatttgattaactgtctttttcctgcctctgtatccctgctttcacaccactgtaagcttgcttcaagctggcccacccccttttgtgaagtgtgtataaaagtcaagtgctgtctttgttccaggccctgtctttggacgtgagtctgctgggcctgagagcactcaataaaagattctcctgttttaacccaaagcctctctctcatcctcctaaatcccacaacaaaaccacaatgagatgctatcttaatcttgctagaagcccataatttaaaagtcagaaaacaatagatgttggcatagatgtggtcaaaagggagcactttgacactgctagtgggaatttaaactagtccgaccactatggtaaacagtatggggattccttaaagaactaaaagtagaccattcattccagcaatcccattactggctatctacccaaaggaaaagaagttattccataaaaaagacacaagaatatggatgtttatagcagccgattcgcaattgcagtgatatgggaccaacttaagtgcccatcaacgaacgagtggataaagcaaatgtggtacaccatggaataatacttgataataaaaaggaacaaaataatgtcctttgcaacaagttggatggaactggaagccattattctaagtgaagtaactgaggaatggcaaatcaaatattgaatgttttcacttttaaatgagagttaagctatgagaatgcaaaggcataagaatgatataatggacttggggactcagggggaaaggttgggagggggatgaggaataaatgatgacatattgggtatattatacactgctcaggagacagatgcctcaaaatctcagaaattaccactaaggaacttttatccacataaccaaaaaccacatatattccacacactattgaaagaaacataaacattattttaaaaaataaagccacttttaaaattagcaaaataaaataaatatgtcttcagagtttagatattggatccaaattagacagatcaaatactgcctttactaaatattttcatgtcattaacaacttctaaaacctttcaaacagttttttgacatgtcttggaaccatccatttctagctaaggcctgggcacctgtgaaatagggccatgcccccccttatactgggaagagtaagatatttcaagactaagatgttttctacagctccatctttttctttaagctctacatcaaggacataattaaaattggttgtctcctaagtggtttactaaaaatgcatacttaagagttaccattataattaatatttgtatctaaagctacttaaaaattttcacacacaaatctgactgaacaagtaaaatatattttaagtcaaagtttataaaaggacatgagaacatagcttttatgaaaaaattagttttgtcaagtttagaggttttcaaatattttaaattcaggaaataaaataacaaaaagacaaaagaaaatggttgaacaacttagaaaaggtttgttaaaattcatcttataaaacaatctacatgtaaaaagtgggctaaaatttgaaagagattatttaggttttccataaattaatccagaaggggtaggaagtcttaagaatgaggaaggacaggaggaaggggaggtcatcctgacactgcagaggcagaagtgcagctgaaggtatgaaggctaagaggggaggggagtttgagtgctgctgcctggctgtcagagcagaggagggtcctgggcaccagacttgaggaagggatgaaaatgctgggcagacctgtagtgggcccttgagatggcagatagtggtttccagagagagggccattgttttccagtgcccagcactgagcagagagagttttgggcagtgtaaaaaaaaaaagagaacttacctctttctcgttttagaaaaagaacagtctaagaatatcagcagggaaactctcagtgcttcaaggggttaaacgcccttttggctttcttgtgttggtttcatcatagaggaggagaaacttcttggaagtgttcctaaaaacacaacacgtctgcttctcctttcaaaaaaggaagtgctaaaacacgaacactctagatccaaatattaatacggatgtctaaatgcttccgttttccaaggggcagaaagctaaaggttgtaacctattcatttcagtcaaagttggtgaaagggaagcaaaggaactgggtggggcttggaaggatgacgaagctcaagctcattggccagcaacctctctcctgggggcgggaggggtgagcatacgtcattgctttggcttctataaaatgaggaggactcaccgagtgtgaagagtccttctggtgattgcagctgagagcacactcacgacgttctgcaaggattctctgattatgattctgaagggaaaagcgatggaatggacagcagagattgtaattttctttatcttgaattacggaagaaagtatctaggacagaaatccacgacaagtccttggaaccagcagatctcttcgttcacggagacgttgacgtattctctattgaagaagattcttaccttcttactggacaaggttttgtcagttctgcgtgactggattgtccgggagactctgaggaaactgatgtcacatgtttttccaaagaagatgtttctggaaccaacaactgtgattgtggtttgaggacttctgagagttccagtacaggaaataagcagaacatcagctggaggctaaacggatccagacttcactcttcacttcccttcctattcagtctattgtgcctgctgactgagaagcttggctggtatgtgagcaaataaacggaactattcagaaggagatgttgacatattctgtattgaagaagatccttatcttctcacctgacaaggttttgtcagttctgtgtgactggattgtccggaagactctgaggaaactgatgtcacatgtttttccaaagaagatgtttctggaaccaacaactgtgattgtggtttgaggacgcctgggagttccggtatgcgaaataagcagaacatcagctggcggctgaagggatgcagcctccactcttcacttcccttgccattccatctattgtgtctgcctgactgagaagcttggctggtatgtgaggaaataaacggaattataaacaaggagattgtttctcatctacttcattctgttgtggcttttctattttggggttcagggtgtgtgacaaggaccaaggagatgaaaggtttcatgatggagaaagcccaggcaatcagattgaagagctatccacagggaatcttggctgctgaggggctgcaccctgcaacggactgaccatatgacagaaaagggttttaaaggctcaacttctggactgagaacccagagtaatttgggaacctcctctgtgaggagatatgaaagctgggaatcatgacatccctaggaatggaaggcacatttcctgatggaaggggtgctttggaaaacaggagcagagtagacacagcagccttgtggatacgggtgggcagcatgcatgggtgatgtgaacgtggagtgtttgtgatcgaaactcaaaatgtctgacaaagtgaaaacctagaaaccacaatgaggaggaagagtttgtgagggcaatcactctccccatgtgtgaaaatcgggggctcttaaaatctcatctggagaggtgcagtctaccaaactctgggactttagcctccccttttaaaaaaccgtgcatcaataccaacgtccgaaaccacagaaataacacctggcttgcatggagacaaggacaaaaagccgtcatgatgagttgttctgctcacttgctgcctctgttcagtgcacaggatattgtccacccactagcaggctactgcaagagaagtgtgcaatatgttccctatgtgccatatatgtgccatatggcccatatgacaactgagtcagaaaatatctgatgccctcagagttacactccacctggagcttgcccccagccatccaggacctaggctccctaccctgtccaattttctggtgttttgggggcttcattctctaaggtgtgcccactctttactcaaaccaaaacacccacatattcctgcccatgaacaaccaatcaaccacttctcagttccacatcctgctgttgggtctctagtggtgacactgtaactcccaggtcatagtggtgacactataacacctagctaaattgatgccttgtctctaggaggccatgggctcctgcaggtctcatctgactctctgtagccttccctgacaatgctcacaatacccaagccagagccacattgacagcaagctgctctcatcttacctttgccagacctggccactggaaaaggctgaccctcatcctgcaatgcctatacctccaacctttgtctcaagctggtgtcctggagggacttctaagcagaaaacagattcagactcccatcctctcctgaatggcctcatatccaattctcagaccctcagccttcattgtaaggacacttcatccatgcccttgagtattctgtctgcactgtgtattctgcaatagattctcctccctctgcgaccctcaactccttccgcagactttttgttttcttgatcatctaccatagtcttccactgggacactgccaagcccattctggagagtgagttgtgcaagtacactgccccccatctacctttcgggaggtgtatacacccttctttctcccaggtctggaggctttctattttcatcctgaggcatctccacctgctcttggattcttcaaattgacaaccaccagttaacaagaactatgtgtcaccaaatagccaaacaatggcaattacaaaaataaaattaatagctgtaacccccattagcaaggatacacaaatcaaatcagggatagtgggtgaggaagtctgcctaacattcaaggaaggattctgaagtgatacaaaatcattgcctttgctatctttagaatggacactttcagccaggcacagttgctcagcctgtaatcccagcactctgagagccccagttgggtggatcacttgaggccagcagcttgagaccaccctgggcaatgtgcagaaaccccaactctactaaaaatacaaaaatagccagttattgtggcacatgcctgtaatcccaactccttgggaggctgaggcacaagaatcacttgaatctgggagccagagtttgtaatgagcgaagatcatgccactgcactctagcctaggcattagagtgataatctgtctgtggaaaataaaaacattcctcttcaaagttttcttctttaaatcataaatgttggaattaatatatcctctttgaaactcactttcttcaagcttctttatttgatggtagtaaatctttgttaagctttatgaggcaagagtaatggaagaagcatattatatatatttatactctaacctcagtgcttgttctagcaagctcaggcatgcgtgaatgtgcccaggcatgttccagcccataccttatatcctttccttattgggaaatgctgttactcctataagcattcttgtaagcaacttcctctttttctttgtctccactatctttacctattgaggacagttttaggttcttagccagttggatgtagcatagactgtgaggtccaaccccagccaatggagatagcacacagcagtagcgacctcatgcttaacagataaatattcctgtctccctttgtttggggtgctctcagctgatgagcaacaccctttctaaagaaattaaagttgtcttgctgagaaaacttttggtctaaatgctgattcttccttgcagcactgaagaagaagcaattatttccaacactttctcatacacaaaaaaagaagaaggtggaagaaaactttcttgtgcaccctatccctcactcagaaagacaacagaaggctcctagtggcaagccctagaggattcatttcttttgggaaccctcttggctgggatactaggactcaggtcaaactcagcattttcagtgtgtgggaagtgtgcttgggtttcactgttacttccaataatgtgatttggtccttggggttcaccaaattttggtatggagtggtgaaccctgttaagtttaagtgtctataaaattaacaaagcaaaataaccattctgccccatggttcagagaccaaatattgtgtaggaaatgctttagcgagagaaacagagaagaataaaaaatgtcctcaagcgctgcattatttcttgttatcgtccagatcttagaggaaaggctttcattttccctcattcagtatgatattagctgtgcatctgtcatttatggcttttattatgttggggtatgttccctgtgtatgtagttttttcagggtttttgttatgaagtgatgttgaactttatcaaacgtttttcagtttcagttgaaacgatcatatgctttttgtccttcattctcttgatatgatgcatcatgttgatgatttccatatggtgcactgtccttgcatcctgggcatgaattccacttgatcatgacaaatgaatttttaatgcattcttgaattccgtttgctggtattttgttgaggatttttgcatcaatattcatcagagatattggcctgcagtttctttttttttcttttttctttgttttgttgtttgtttgtttgtttgttttgatgtgtctatgtctggttttggtatctgggtagtagtgttccatccccttttattttttagaataatttgaataagactggtgttggttctttaaatatttggtagaattccgaagtgaagtcattgggccccgggcttttctttagtggaaggctgtttattatggcttcaatctcgttacttattattggtctattcatgttttgaatttgttccttatttaatcttggtaggctgtgtgtatctaggaatttgtccatttcttttagattttcaaatttattggcacataattgcccattgtagcctctaatcgtcatttgagttcctgcagtaccaattataatgtctccttcttcatttttgattgtatttatttggatcctgcccctttttttcttacttaggctgcctaataatttcttaattttgttgaactttttcttttgtttgtctcgctctgccaccaggctggagtgtagtggtgtgatcttggctcactggaacctccgtctcccaggttcaagcaattctcctgcctcaccctcccaaatagctgggactacaggcaagtgccaccactcccagctaatttttgtatttttagtagacacgggttttcaccatgttggccaggatggtctcgatctcttgacttcataatccacctgcctcagcctcccaaagtgctgggattacaggcatgagccactgcgcccagcctaattttgtttaaattttcaagaaatcaacttcttctttcattgatttctgtattttttatttccattttatttatttaaactctaagctttattctatcttcttctcattttagctttggtatgcttattgcctctctagctctttaatgtgcattgttagattgtttatttgaagttcttcctctctacaccataagacgtaagcatgtcctcattatgtcataagatgtaaccacttacagctataaacttccttcttagttctgcttttgctgtatctcataggctttgttatgttgtgtttccattatcaattgtgtcagaaatttttcaatatttttcttaatttcttcattgagcaactgatcatttgggagcatatttttaaacttccatgtacttacatagtttccaaaatacctcttgtgatcaatttctagttttattccactatggttcaagaagatgcttgatattatttcaattttttttcacattttaagatgtgttttgtgacctaacatatggtctactttttttttttattaaactttaagttgtggggtacatgtgtagaccgtgcagttttgttacataggtatacacgtgccatggtggtttgctgctcccattaacctgtcatctacattaggtacttctcataatgctatccctcccctaacctccaccctctgacaggacctggtgtgtgatgttcccctccctgtgtccatgtgatctatttttgagaatgatccatgtggattagaatgctgtggaaaagactttggattcctaatatccagggagggagacgatgatattactttcaatatcacacgggtgtacacactctctgtgacattgttcctaatatccagtggaagagaggatgatataacacccagggagggagaggatgatattactcttaatattgcagggtgtgtacccatgcctatgatattgttcctaatatcaggagggggagaggatgatattactcagaatatggcagggggtgtacacacactctgtgacatggttcttaatatacaggggagaatgggacaatattactctcaatatcgcagggggcgtacaaccctgtgatttgttcctaatatacaaaaggggacagtatgatattgttcctaaaatcgcagaaggtgtacaacgccctgtgatattgttcctaatatccagggcgggagaggatgatattacccccaatatcacagggggtgtgcactttccctgttacattgttcctatgatccgagtggggggaaatgacattagtcccaatatcgcaggatgtgtacactactcccccatgatattgttcctaatatcaagggggagagaggaggatattactcccaatatcgcaagggaggtacatcctccatgcaatattgttcgtaatattcaggaggagagaggaagatattactctcaatatcgcagaaagtggacacccaccctgtgatgttcttcataatatccagggaagcagacgattatatgactttcaatatcgctgggagtgtacatcccttttgggatattgtttctaatatccaggaagggagaggattatattacttccagtattgcagccagtgtacacatttcttgtgatattgttcctaatatccagaaagggaaaggatgatattactcccaatattgcaggtggtgtacacccccctctgatattgttccttacatcaaggaaaagaaagaagaatattactcccaatatcgaagagagtgtacacccctcctgtgatattgtatttaatatccatggggaaagaggatgttgttactcccaatatcgcagggggtttacacccacactgtgatattgttcctaaaatccagtgaaggagaaaataatattgctcccaatattgcagggtgtatacaggccctcccccgttatattgctcctaatatccagcggtggagaggatattactttcaatttttgcagggagtgtgtaccccctctctgatatttttctaatatcaaggatgggaaaggatgccattactcccaatatcgcaggaggtgtacatgccctgtgatattgttcctaatatccagggaggtagaggatgatattactttcaatattgcaggggctgtacaccctctatgatgttgttattaatatttaggttgggagaaaatgatatttttcctaatatcctgggaaggaaaggatgatattactgtaaatattccagggagtgtacaccttcctaatattctaatattgttcctaatatccaggggtgggagaggattatattactcccaatatcgcagtgggtgtacacccctcctgtgatgttgtttctaatatccaagcgaggagaaaatgatatcactctcaataccgcagggggtgtacaccttccccatcatatcgttcctaatattcagagggaaagaagatgatgttactttcaatatcgcaggggttgtacacaacccctgtgatatttctcctaatatccaggaagaaagaggatgatattgctcccattatagcagacggtatacgcctccctgtaacattgtttctaatatcaagactgggagaggatgatatcacttccagtatcgcaaggggtgtacacctcccccgtgatattgttactaatatccagggggaagaggataatattactttcaatattgcaggggctgtacacccccgtgatattgttgttaatatttaggttgggagaaaatgatattagtccaaatatcgcagagagtgtacacacttccgataatattgttcttaatatccatgggggagacgatgatattacacccaatatcgcagggggtgtagtctccccttgtgatattgtccctaatattcagggaagtaaacgatgatgttagtgtgaatattccagggagtgtacaccccctttgtgatattgtcctaatatccgcaggagagaagataatattactcccaatatcgcagggggtgaacacaccccctgtgatattgtttctaatatccaagcgaggagaaaataatattactcccaatgtctcaggggatatacaccttccctatgatattgtttctaatattcaggtggaaaacgggtgatattactcctaatatccaggaagaaaggggattatgttactccccttatagcagggggtatacacctcccctgtaatattgttcctaatatcaaggctgggatatacgtggggggaaggatgatattactcccaatatcacaggggttataaaaccttctgtgatattgctcctaataaccatggcggaagaagatgatattactcctaatattgcaggaggtgtacactcccccattatgttgttcctagtatgcagaaaaggagaggatgacattattgccaatatcgcagggtgtgtacaccacccatgatattgttcctaatatttagagggacagaggatgatattactcccaatatcgcagggggtgtacacgcatcccctgtgatattgttcttgaaatcgaggggaaagagaattatatttctctaaatattgcagagggtgtacaccgccccctgtgatattgttcctaatagccgggggcggggggagataattaaattactttcaatatctcagagagtgtacatcccccttgtgacattgttcctaatatccagagcaaaagagaatgatattcctcccagtatcgcaggaagtgtacatttaacctgtaatattgtttctaatatccagggggaagagaatagtaatactcccaatatcgtaggggttgtacaccttttctgtgatattgttgcaaatatttagaagagagagagaatattactcgcaatatcacagggaatgtatacttcccctgtgatattgttctaatatctagaaaaagagaggataatattactcctaatattgcagggggtgtacacccccacttgtgatattgttcctaatataaaggaaggtcgaaaaacaaacggggagcccagggggaaggaaggcaggcgaggaagaggcagcgccggggcgccggagggagcagccgggccgcggaagcgcgagcacgagaccggtcgcggtcgcagtcgcatttttgccgttgtcgcggccgccgccgccgaggcttacccggggatgtctgagcccgcgcctcgcggcccccaagctccacgctgcgcccgctgtcccggcctctaagggccgccacgtccctgcggcgcgcgcaggcagaaagcggcttcgtgccggcggagggggcccgggcgggccgggaaaggctgccccaggccccgcgcctaccccatcaccgcggccggcgccgggccgggaggatgagcggtgtggggctctgaagcatggagggggttttgtacaagtggaccaactatctcacaggttggcagcctcgttggtttgttttagataatggaatcttatcctattatgattcacaagatgatgtttgcaaagggagcaaaggaagcataaagatggcagtttgtgaaattaaaggtgacagctttggaggggaccacccttgattggatacataaattctgttcattcagcagacaacacaagaatggaattaatcattcctggagagcagcatttctacatgaaggcagtgaacgcagctgaaagacagaggtggctggtcgctctggggagctccaaagcatgtttgactgatacaaggactaaaaacgaaaaagaaagaagtgaaaccagtgaatcgctgaaaaccaaaatgtctgaacttcgcctctactgtgacctcttaatgcagcaagttcatacgatacaggaatttgttcaccacgatgagaatcattcatctcctagtgcagagaacatcaatgaagcctcttctctgcttagtgccacgtgtaacacgttcatcacaacgcttgaggaatgtgtgaagatagccaatgccaggtttaaacctgagatgtttcaacggcaccatccggatcccttagtttctcctgtgtcaccttctcctgttcaaatgaggaagcgttctgtcagccaccctggttcttgcaccagggaggagtagccactgtataaaagaaccagtatctgcacttcaccgactctcccagcgacgccgaagaacctactcagatacagattcttgtagtgatattcctcttgaagacccagatagacctgttcactgttcaaaaaatacacttaatggagatttggcatcagcaaccattcctgaagaaagcagacttatggccaaaaaacaatctgaatcagaagatactcttccatccttctcttcctgaagaaactgtagtgtccaactttctctaagtattgctatgcaaaagctgctgtaattgaactattgttatagggagtagttttttcccttaggactctgcactttatagaatattgtaaaacagacaaacaagaaaacaaaccacatacttttgaagcgtgttttatctttatatagtttgtttgcaagagtattttcctaataacttcacagtatgaatgtgcatcttttttttctttttttaacaaatgatggtgtaacattttgacatccataaggacaaatgtagatatttttctaaaaaaccgtgaggggactgacagcttggtcagggtgtattgtagcttataaacatgaaatcttacaaggtttcagtttgacagaagtgtgatatatgtaacttgtgccatggaccaaatggtcactttaccacagctaaaaatgagttatgatagcagcttgatggtgattgcattgtattcctttaatcaaaaaggaaacgcaatattctaagtatctttagcccaaataccatgacatattgagcatctttaaataaccagactgtattgtccttcatatgtgaagttgacactactgatttgtcaataccaaattttgggttaaagtgtttaatttttatttatttattttcttgttgcctcaaaagatgattgcattctaacttttgtgacctaccaaatttaagatgtgtatacattgttctttacgttgttctagaaaagagattttaatgctgtagtgacttagctcacttacatcagagaaataaacaactttcaatggaaaaaaatatatataaaggaaggaagaggatgatattacttctcatatagaaggggttgtacaccccccttgtgatattgttcctaatattcagggagggagaggattatattactcccaatatagcagggagtgtacacccccccccccgtgataatgttcctaatattcagggaagcagaggatgatattactttcaatatcacagggggtgtgctgtccccctgttatattgttcttaatattcaggggggagaggatattattatgcccgatatcacaggagaagtacaccccacaagtgatattgttcctaatatccaggggtaaagaggatgatatcgcaggtggtgtacacccctccccgtgatattgtttctaatataaagaaggagagagcatgatattactcccaatatcgctggaggtctacaccccccttgtgatactgttcctaatatccaggaagggaaacaatgatattgctgtgaatattccagggggtgtacacccctttgtaatattgttcctcatatccagggggtagagaggatgatattactcccaatatcgcagggggtgcacggccccactgtgatattgtttttcatatccaggaggggagaggatgacattactctcaatatggcagggggcgaacaccccctgtgatattgtgctagttaggttgggagaaaatgatattactcccaatatcgcagggggtgtacaccgctcctgtgatattgttcctaatatccatgacgggagaggatattactcccaatatcgcagggggtgtacctctcccctgtgggattgttcacagtatccaaaagggaagaggatgatgttactcccaatatcacagggagtgtacaccaccattgtgatattgttcctaatagccagggaagaaaacgatgatattattgtgaatattacagggggtgtacacaccccctgtgatatggtttttaatatacaggttggaaaaggatgatattactcccaatatcacaaaaggtgtacacacccccccatgatattgttcttaatacttcggtggggagaaaatgatattagtctccatatcacaggggtgtgaactcctccggtgatattgtttttaatatcaagaggggaggagatgatattgctttcaatatcgctgggggtgtacatccctcctgtgatattgttccttatatccaggcgaggggaaaataatattactcccaatagtacacaccccatgtggtattgttcctaatactcagggggaaagaagataatattactttcaatatcacagggtttgtacacctttcctgtggtatagttttcaatatccagggggaaggtacatgatattactcccattgcagcaaggggtgtacacacctcctgtgatattgttcctaatatccagaagtggtgaggatgatattactcccagggggtgtacaccccacctatgatattgtttctaatatccaggggaaaagagtgtgatattatgcccaatatcgcagagggtgtacacttatcctgggatattgtttctagtatttggggagggaggagaggatgctattattctcaatatcgcagaaattgtacacccccgctgtgatattcttcataataatcagggaaaaagaggatgatattactaccaatattgcagggggttacacttcccctttggtagtgttcctaatatccaggaagaaagaggatgatattaatcccattttccaggaagtgtacacccaccgtgtcatgttgttcctaatatccagcagggaagaggatgatattactcccaatatcggagagggtgtacacttcccctgttatattgtttctaatacccagggggaagaaggatgacattactgccaatatcacagggtgtgtaccccaccctgctattgttcctaatattcaaaaggaaagatgaaaatattactcccaatatctcagggtgtgtacacctctcctgtgatatcgttcctaatatccacaggaagagagaatattactctcaatattgcaggggggtgtacacccccctgtgatattgttccaaatattcgggcggggagaggatgatattagtcccaatatcgcagggggtgtgcaccaacctgtgatattgttcctaatatccatgcgggggaggacgatatcactctcaatgtcgcaggaagtgtacacctctcttgttatatttttcttaatatccaggagggaaaagatgatattactgccaatatcgcagggtgtgtccaccccccttttatattgttcctaatatccaatggaaaagaggatgacattgctctccatatcccagaaggtgtacaacgcccctgtaatattgttcctaatattttgggggaagagaggatgatataacttataatatcacaggaggtgtacaccacccctatgtattgttcctaatatcctttaagggagaggatgatattactcccaatatctcaggtggtgcctattccccctgtgatattgtttttaatatccaggggaagagagtatgatattacgcccaatatcgcagggggcatacaccctctctgagatattgttcataatatatagagggagagaggatgatattacttccaatatcagaggtggggtacaccccccggttatattattcttgatatccaggaggggagaggttgatattactggatatatagcagggagtgttcacatcttctgtgatactgttcctaatatccagaaaagtagaggatgatattactcccaatatcgcagaacgtgtacacctccctgtgatattgatcctaacattcaaaggggagaggatgatattactcaaaacatcacagggcatgtacactcccctgtgatattgttcctagtatccagaagggagcaagataatattactttcaatatcgcagggggtgtacacccctctttggtatgtttcctaatatccagaaggaaagagggtgctattactttccatattgcaaggggtgtacacccccctgtggtatggttcataatatccagggagggaaagggtgctattattccccatatcgcgaggcatgtacaccctgctgcggtacggttcctaatatccagggggaaagaggatgctattacttcccatatcgcggggtgtgtacacccccgtgtggtatgttttgtaatctccgggaacgaagagggtgttattacccctcatatcgctggaaatgtacactcccctgtggtacggttcacaatatccaggggattgagggtgctattactccccatatcgcggggggagtgcacctccctgtggtatggttcgaaatatccagggtaagagagggtgctattattccccattttgcaggaggcgtacacccctctatggtatgttttgtaatatcccaggtaaggggtgctattgagagaagagagcaaaagaccccccccatattgttctgtattattttatactcagtacctgttttaagaagaaacaaggaagcgaaaccaaaggcaggcagcccggcgccaggcaccagatccaaaaccagacccgaaaccaggcctgggccttcctgaccttagcctgaaagttaaaattcaacccatgacctagcaactgatgttatccatagattccagacattgtatggaaggacattgtgaaatttcttgttctgttctgtttcactctgagtactggtgcatgcagcccttgtcacatacccactagattgctcaatcaatcatggccctttcatgtaaaaaccttagtgttgtgagcccttaaaaaggacagaaattgtgcactcaacaagcttggattttgatactctagtctgctgatgcttccagctgattaaaagccacttccttcactacctcggtgtctgtgggattttgtccgcggctcctcctgctacactgtgactccccttatagagaggggtgtacacccccctttggttcctaatatccagcgggggagtaggtgctattactccccatattgcggggagtgtacacccccttgtagtacggatcgtaaaatcaaggagggagagaaggtgtaattatccccatatcacagggagtgtacacccctttgtggtatagtttgtaatatccacgacgggagagaatgctattactccccatatcgtggagggtgtacaccgccctgtagtatggttcgtaatatccggaaggggagaggttgctattactccccatatggtgggaagtgtacacccccatgtgatatggttcataatatccaggggggtagaggatgatattacccacaatatcatagaaggtgcacacccttttgtgatattgtccataaaatccagaaggggagaggatgatattacttccaatatcacagggggtgtgtagccccatatgatattgtttgtaatatcaaggtagggagaggatgctattccttacaatagctcaaggggtgtaaccttcttgtgatattgtttgtaatatccagaaggggagaagataatttttttattttaaaagtaaactttaatgtcaaaaatgcaaacttgagaagggcagaaagatcaaacagaaggctgccacttcacaattggagggttgcacagtggccgggcagaggcgctcctcactccccagacggtgaggcagccgggcagaggtgctcctcacttccgagatgttgcaggagccgggcagaggtgctcctcacttcccagaacagggggctgccgggcagaggtgctcctcactgcccagacggtttgcaggcctggcagaggcactcctcacttcccaaacggagcagcggcaagccagaggcgctccacacttcccagatggtggggcagccgggcagaggcgatcctcacttctcagagggtagggcggcccagcagaggcgctcctcacttcccacatggtggggcggcaggctagaggcgatcctcacttcccagacggtggtgtggccatgcagaggtgctcctcacttcccagatggtgtggccgccgagctgaggcactcctcacttccctgacagtggggcggctgggcagaggcgctcctcacttcccagacacttggactccgggcagagactctcctcatttcccagatggtggggctgccgggcagaggcgctcctcacttcccagacggttcagaggccgggcagaggcgctctggggagaggataatgttactcccaatatcgcagggggtgcacactccctgtgatattgttccgaatatccagagggggaaaggatgatatagctcccaaaatcgtggggagtgtacacccccctgtgatcttgtttgtaataccaagaagaaaagagaatgctattatttccaatatagcagggggagtacaaccccctgtgatattgttcgtaatatctagggggagagaaaattatattagtcttaatatctcaggggacgttcatccccctgtaatattgttggtaatattcagaatggagaagatgatattgttcttaaaatacaggaaaaaatatgataatattacttccaatatcgaagggggtgtacactctcctgtgatattgttcccaatatccagaatgaaagaggatgctattactcccaatatcccagggagtgtacacccctttgccatattgttcataatatccaggggaagacaggataacattactcccaatatcaccgggggtgtccacccactagtgatatttattgttcatcatatccagaaaaggagaggatgatattactcccaatattgcaggtggtgtacggtccctgtgatattctttgaaatatctagaaaaggagaggatgatatcactccgagtatcacagggggtgtacacccccctgtgatattgttcgtaatatccaggggagaaaaggatgatataattgccaatatttcaggggatgtgcacctccctgtgatattgtttgtaatatccaggggtggagaggatgatattactcaaaataacgtaaacatcctgtgtgtacatcccctgtgatattgtttataatatccaggggggtagaagatgacattacccccaatatcacagagtgtacacacccctgggatactgttcataatatccaggcgggaaagaatgaactacttccaatatcgcaggatatgtacacccccctgtgatatatttcctaatatttatgtgggtaaggatattacccccaatatcacagaaggtgtacatcctctttgtgatattattcctaacatccaggaaaggagagaatgatattactcccagtatcgcagggggtgtacaccacccctgtgatattgttgctaatatccagggggagaggataatattactcccaaaatcacaggggacgtacactcctcctgagatattgttcctaatattcatggggaaaagaatgctactactccaaatacagcagagggtgtacaccatccccgtgatattgttttttatatccaaagggtgaaaggctgatattactcccaatatcgcagggggtgtacaggccccccatgatatcattcttaatatccagggaggcaaagaatgatgttactcccaatattgcaggctgtatacaccccccgtgatattgttcctaatatccagagtaagagaggatgacattgctcccaatattgcaggggttgcacgcacgccctgtgataatattactcccaatatcaacagtgggtgtacactcctcctgtgatattgtttgttatatctaagaaagaagaggatgatattactgtcaatatcacagaaggtgtacagccccttgtgatgttgtttctaatatccagcggtgagaggatggtattactcgcaatattgtagggggtgtccaacggccctgtgatattgtttctcatattcaaaaaggaaaagaataatataactccaaatatcgcagggtgtgtacacttccctgtgatattgatcctaatatccaggaagagagaggatgatattaatcccaatatcacagggggtgtacatcgcttctgtgatattcttcctaatatccagggggggaggggatgctattactcttaaaatcgcagggaacttacactcccactatgatatttttcctaatatccaggaagggagaaaatgatattactcctaatatcacatatcacaatgggtgtacatctccccgtgatattgtttctaatatcaaggatgggagaaaattatattactctcaatatcgcagggggtgtgcacacctcctgtgatattgttcctagtatccagcggaggagatgatattactttaaatattgtagaaggtgtacaacccccctttgatattgttcctaatatccagggggaaaggagatgatattactcctaatatcgcaggggctgtacaaccctatgtgatattgtttcttctaatatccaggggtggagaagataatattactcctaaaatcgaaggggacatacactccccctgtgatatttttcctaatatccagaaggaaagaggatgatattactcctaatattacaagaaatgtatacctgtcctgtgatattgttcctaatatccagaggggtaaatgattatattactcccaatatcgcaggggtgtacaccttccctgagatattgtttctaatatgcagtggaggagaggatggtattactcccaacatcacaggagatgtaaactccccttgtgatattcttcctaatgttcaggacgaaggagggtaatattactcactgtattgcagcagggggtgtagagccccctgtgatattgtttttaatattcaaggttggagaaaataatattccttccaatatcgcatggggtgtacacccttctttttatatagtttctaatatctggggggagaggatgatattactcccaatatcgcagggggattacacccccactgtgatattgtttttaatatccagggtgggagaggataatattactccaaatatcccagggctatacaccctccgtgtgatattgtttctaatatccagaggaagagaagatgatattactcccaatgtcacagggtgtgtacaggccttctttgatattgttcttaatatccatgagggagaggatgatattactcccaatatcgcaaagactgtacaccctttctgtgatattgcttccaatatccagggagggagaggatattacactcaggatcacagggggtgtacaccccaacctgtgatattgtttctaatatctagggaaaatgagggtgatattactatcaatatcacaggaggtgtacactcccttatgatattgttcctaatatccaggagaatgacaggataatattactcccaatatcgcgggtggtgtctccccccactccgtgatattgttcctaatacccagagggggagagaatcatattactcccaatatcgcaggggatgtacacctacatccggcggagtagaagataatattactcacaatatcgcaagaagtgttcaccttccctgttatattgttgctaatatccagggagtgagaagatgatattactttcaatactgagcgtgtacactacccctgtgatattgtttctcatatccagtagaggagaaaatcatgttactcccaatattgcaggggtgaacacctcctttgtgatatttttcctaatatcaggaaagggagagtatgatattacccttaatattgacaggggtgtacacccccctttgatattgttccaatatccaggggggcagaggataatattattcccaatatcgcagagggtgtacaccccccgtgatattgttcctaatatccagagaaataaaaaatagtattatttccaatatcacagggcgtacattttccctgtaattttgttcctaatatctggggggtggggtggcaggataatattactctcaatattggagagggtgtacacccccctgtgatattgttcctaatattcagggtgggagagaatgatgttactcccaatatctcaggagtcgtatacacccccttgtgatattttttctaatatccaggaggcagaggatgatattgctcccaatatcgcagggggtatacacccgagctgtgatattgtttctaatatgcaatatgggggaaggatgattttactttcaatatcgcagggaatgtacactttccttgtgattttgttcctaatatccaggggtggagaagatgctattactatattactcctcatatcgcaggcggtgtacaactccctgtgatatggttcagaatatccagagtgaaaaaggagggtgacattactcccaatatcgggggggtgtacacccctttgtgatgtggttggtaatatccaggggggcagatgagggtgatatcactccccatatcgtggaaggcgtccacttttttgtgatgtggttctttatatcccgaggggagaaggtgatattactccccatatcgcgaagggcatacacccccctgtgatatagctcataatattccggagagtggaggaagatactatgccctatatcgcgggtggcctacaaccccctatggtttggcttataatatccaggggggagagggtaatattgctccccatattgtggagacgtacagccccctgtgatatggtttgtaatatctttggggggcgagggtgatattactccccatatcgcggggagcatacacccccgtgatctggttcatagtatctcaaaggaagaagttgatgtgtacaacttaagggaaaaagttgaagtgaagtgtacacacgccctgtgacgtggttcataatatccaggcgggggagaggagagtgatatttactccccatatcgcgggtgttgtaaactcccctgtgatatagttcataatatccaggggagagaggagggtgatattgctcctcatatcgcgaagggtgtacaaccccctgtgatatggttcataatatccagaagggtagaggacgatgatattactccacatatcttgggaggtgtgatatggttcgtaatatccagcgatgagagaatgatattactccccatatcgcaaaaggtgtgatagggtttgtaatatcctgagggggagagggtgatattaatccctatattgcagaaggactacaccctcccatgacatggtttgtaatatcccagggggtagagtgtgatattactttccatatcacagggggtgtgatatgattcgtaatattcgaagggggagagggtgacactactctccatatcacggggtgtgtgatatggttcttaatatcccaggggttagaggttgatattaccccctttttggggggtgtgtacaccccctgtgatatggttcgtaatatcccgggggagacagggtgacattattccccatatcgaggggatcgtacaccccctgtggtgtggttcataatatccctagggggagatggtgatattactccccatatcagggggcgtgcactcttctgtggtataattagtaatatccagggggcagaggtcgatattcgtttccatatcatgaagggagtacacttccctgtgatatggttcctaatatccaggggggagagggtgatattattccccatattgcggggggacatacaacccctgtgatatggttcataataaccagaaaagaagagggtgatattaatccccgtattgcagagggcatacaccccccctgtgatatggtttgtaatatctaggggaggaaaaggtgatattactttccatattgctgggtgcagacacccctttatgatatggttcataatatccaagttggagagggtgatattacttcccatatcatgggaggtatacccttccctgtgatatggttcgtaatatccagaaggggagagattgatattactccccatattgtggggggcgtacaccttcctgtgatacggtttgtaatatctaggggatatagtgggtgatattactcaccatatcacgggggttgtaacatggtttgtaatatccaggggaggagagggtaatgttactccccatatctcggggcatgtacaccctcctgtgacatggttcgtaatatccaggtcgggagagggtgatattactcctcatattgccgggggtgtgttatggttcataatatcctggggaaggaggctgctatcactctccacatcttgggggatgtacactctcctgtgatatggttcataatatccagggtgggtgagggtaatattactccccatatcgcgggaagtgtacatacccctgtaatattgtttgtaatagaagagagggtgatattactccccacatcgcgggtggtgcccacccccctgtgatatggtttggaatatccagggggatgaggagggtgatattactccccatatctcggtgggagtacatccctctttgatcaagttcataatatccaaaaggaaacaggagagtgatattactccccatatcgccgggggtgtacacgggagggggagtacacccccggcgatatggtctgtaatatccagggaaggagaggagggtgatattactcaccatatcgcaggtggtctacatttacctgtgaaacagtttgtaatatccagggggggaaatgagaatgattttttttttttgagtctcactgtgtcacccaggttggagtgcagtggcacgatcttggctcactgcaacccccgcctcctggactcaagcaattctcctctcccagcctcctgaatagctgggactacaggcgcaccccacaacgtctggctaatttttgtatttttattagagacggggtttcaccatattggccaggctgatctcgaactcctgaccctgtgatccatccgcctcggcctccaaaagtgctgagattacagatgtgagccaccacgcatggcccaaggagaacgatattactccccatatcccagggggtgtatatccccctgtgatatggttcagaatatccggaaggaaagacagggatattacttcccatatcgcaaggggtgtgacatggttcgtaatatcccatgggggagagggtaatattactcttcgtattgtgaagggcatacactcccctgtgatacagttcataatattccggggagtagaggaagatattatgctccatatcgcgggtggcataagccccctgtggtttggttcataatatccagggaggagagggtaatattactccccatattgtggggacgtacaccctcctgtgatatggtttgtaatatcccagaggggagagagtgatattactccccatattgcagggacatacacccccctgtgatatggttcaaaatgtcttttttttttgaaggactggttctttatttcaaaaagacacttgtcaatattcattatcaaaacagttgcactattgatttctctttctcccaatcggccccaagtagaccacatcaaaggagagtacatattaagccaataagctgtaggatgtacacctaacagacctcctagaaaccttaccagaaaatggggacagggtagggaaagaaactttaaaagatcaacaaactgccagcccacggactgcaggggctgtcacagccagatggggtggccagggtgccacaaacccaaagaagcaaagtttcaaaataatataaaatttaaaaagttttgtacataagctattcaagatttctccagcactgactgatacaaagcacaatgagatggcacttgtagagacagcagcttcaaactcagaaaagggtaatgagatgagtttcacatggctaaatcagtggcaaaaacacaatcttctttctttctttctttctttcaaggaggcaagaaaagcaattaagtgctcacctcaacataaggggaacatgatccattctgtaagcagttgggagggggtagagatggaacaaaattttggtctcagaggtcttgccatcttaatttggtcacttctaatgaaaaaaataaaaaatagaaataacattatccaaaggtatcttaaagctgaaaacttgaacagcacattttttgttgttgttgtttggctaactcctcctggaaccacctttctggcttagctagtactttgtacagagcaatgaggcttcccatagtggagtctccctgggctctgtttggctctcagcaaggcaggcctataccttttcctctcctccatggagagaggaatatgcattaaggtgaaaaatcaccttccaaaagtgagaaagggattcgatcgctgcttcagggctgtggtattatatggaatgttttacaaaaggttgctacaaaacaacaaaagaggtaattacaaaatgtgtacatcacaacatactttttaaagacattatgcattgtgctcacattcccttaaatgttgtttccaaaggtgctcagcctctagcccagctggaatctccgggaagaggcggacagtttggtgaaaaagacacagggaaggagcgggcggcggaaggagggggcggcgaaaggagaaagcagccttccagttaaagatcagccctcaattaaaggtcagcttcgggcaggctggcctcaggcggagtctggttcagagggaggagcagcagcagggtgagactgaggcgttctacatctcattcaggtcaagcagagtctggtccagcatcctttgtgtacagaggtgctcccctttggtgcatttcagtttatcttccaagtcatcaattgtcttttccagcttggctaccgatctctcagcaaactcagcatgggtctccgcctcctttattttatcagtaagaatcttgatctcttcctcatatttgtcttctttttgagagtacttttcttcagcagcactcagacacttcaggttctggtccatcagtctaatctgctcatccatctctcggcaaagggattctgccagctcagctcgttcctctgtgcgttccaagtctccttcaatgatcaccaacttacgagccacctcttcatacttcctatctgcctcttctgcaatgtgcttagcttctctgagttggatttcctggagttccatcttttcttcatcttttaaggcccggttttcaataaccttcttacctctctcactctcatcagcagctttttccgcttcttccagcttttgcagggcagtagccaggtgctcctgagcacggtccagctcctcttcaaccagctggatcccacgttcaaggaggccacctcagcctcagcctgttcccgggcccacctttctccctcaacttctcgctggaggcgctcagctcgctcctctgcatcatctgcctgctgctgcagaacctggatcttgcgcttcaccgcctcgatggtggtgatcccagccatggtgcccacccagctactgctagagctccggttcctgcctcctccgatcggcgttgcagcctcctctcacccttacttccgcctcggttcaaaatatcttaagggaaggagttgatattactccccacatcacgggaagtttacatcccctggtgatatggtttgtaatatcccagggtggatagggtgatattactctccatatcgcgaaggagtactcccccctgtgatatggttcataatatccttggggggagagtgtgatattactccccatatcgcgagggccatatactcctttgtgacatggttcgaaatatcccggtgggggagggggtagagggtaatattactccccatacagcgaagagcatacgcccttctgtggcaaggttagtaatacttcagggaaaagagtgcaatattacttttcatattgcagggaacatacactcccctgtgacatggttcgtaatatcccgggggctgagagggtgatatttctccccatatcaccgggggcctacacctgggtgtgatatggctcataatatacagggagggagagggtgatattactccacataccgagtgaggggttacacaccctcgtgacatgttcgaaataccccaaggaggagacaatgatattactttccctgtcgcgggggctacaccctcccagtgatatggttcacaatatcccggggtggagagggtgatattactccctatatcaccggggggtgtacacttccctgggaaatggtttacagtatccccggggggagagggtactattactccccatatcacgttacatatcagggtacacccccacgtgatatggtttgtaacatcccaggaggaagaaaatgatattactccccatatcgcggtggcatacacccctccccgttaaatggttcataatatcttggggtggagagggtgatattactccccatatcacgtggggcatacaccccactatgatatggttcataatatcccggaggggagagggagatattactctccatgtcgcggggggcatatacacccctgtgatatggtttgtgatatcccgggggcggagagggagatattactctccatatcgtggggtcgtacacttttctgtgatatgattcgtaatatccagacggggagagggtgatattacttcccatattgcgggggcgtacacccctctgtgatatggttcataatatcccgaagaaaagagggtgatattactcctcatatcgcggggaacacacaccaccctgtgatatggtttgtaatattcagcgggggagagagtaatattactccctgtatctcggatggcgtacactcccctgtgatatggttcataatatccagaagaaaagagggtgatattactccccatattccagggaatgtacaccaccctttgaatatggttcgtaatatccaggaggggagagggtaatattgctcccaatatcgaaggaggtgttatacggttagtaatatccagagaaggagagggtgacattactccccacatcgtggtgggtgtgcacccacctgtgatatggttcataatattcaggttaagagaggtgatattgctttccatatcgccaagggtgtacactcccgtgaaatacagttcgtaatatccaaaaggggagagggtgatattactcccatatcgtggggggtgtacacccctctgtgatatggttcataatatccagggtggaataaggtggtattactccctgtatctcggggcatgtacatcgcctgtgatatgattcataatatccagaagaagagagggtgatattaatctccatattgctgggggtgtacaaccccctgttgtatggtttgttacactgagttggggagagggttacattactctcaatatcgagtggggcatacacacttatgtgatatggttcataatatcccagggaggagagggtgatattactccccatatcgcgggaggcatacaccccaatgtgatatggtttgtaatatctacatttttttttttgagacgaagtctcgctcttgtcccccaggctggagtatgatggccggatctcggctcactgcaacctcagcctcccgggttcaagcgattctcctgccttggtcccccaagaagttgggattacaggcgcacaccaccacgcccggctactttttgtatttttagtagagaaggggtttcaccatgttggccaggctggtctagaactcctgacctcagatgatccacctgcctcggcctcccaaagtgctgggattacaggcgtgagccactgcacctggcctggtttgtaatatctatgaagggggaaggtgatattactttccatatcacgggaggcgtacaccacgatgtgatatggtttgtaatatccagggggtatactgggtgatattactccccatatcgcggggagtgtatacccttttgtgatatggttcctaatattaagctgaggagaaggtaatattactccccatatcgcaggggtttttatatggttcataatattcaggaagagagagggtgacattactctccatatcacggggtgtgtactcccccatgtgatatggtttgtaatatccagggaaggagaggttaatattactccccatatcgcagggggtgtacacctctctgtggtttgtaatatccaaagggaagaggatgatattatcttcaatatcttggggggatacagtccccagtgatattgttcataatatccagagggggaggggatgatattactcccaatattgcaggtggtgtacaaccccctgtgatattctttataatatagagggggatgatgatattactcccaatatagtaaacaacctgtgtgtacaccccctgtgatattgtttataatatccaagggtggaaaggatgatattactcctcatatcgcagggggtgtatacccctctgtgacattgttcctaatattcaggggaggagaagatgatactactcctcatatcacaggggatgtacacccccctgtgatacttttggtaatatccaggggaggagaaaattatattattccccatgtcacagagggtgtacaccccgctgtgatagtgttcataatatccaggtgaaaagaggatgatattactccgaatatctcaggaagtgtacacccttctgtgatattgttcataatatccaaaggtggagaggaggatactactccccatatcgcagtgggtgtacacccccctgtgatatggttcataatatccaatgtaggagaggatgatattactttccatatcgcggagagtgtacatccccctgttatattgtttgtaatattcagggagaaagaggatactactactccccatatcacacggggtgtatattcccctgtgatatggttcctgatatccaagagatattataatcctctcttggattatgctacctctcatatcgcatggggtgtacacacactttgtgatatcgtttgtcatatccaaggagggagaggattatattaatcccaagatcacggggggtgtacaccctcctgtgatattgtttgtaatattaaggggggagaggataatattactcccaatataattaacaccctgtgtgtactcctccttgtaatattgttcataatatccaatgggggagacgatgatattactttcaatatcgcagaggatgtacatccctttgtaacaatgtttgtaatataaaaggcaagagaggatgatactacttccaaaattgcaggacatgtacaccccccggtgatattgttcctaatatccagtggggaagaggatgatagtagtcccaatatcgcaaagggtgtacacaccccctgggatattgttcctaatataaaaggaggagaggatgctattattcccaatatcacagaaggtgtaaaatcccctgtgatattgttcgtaatattcaggaggggagaggattatattactcccaatatcacagggtgtgtacacagggaggggcaagggccagaagcgggcgggaatccccatgtttgggcggacccagtttctaatggccagcatttgccaatcaaagcttaccagagaactctaaaagccagggctttcctgctagacaagactcatttctggaactgctttaaaaagaaacaaaacttcccaaggaccccttttcctctctgtctgcctaaaataatgttttaaaaactcctaaagcagctgaattcagcccccttcctgggggaatgtatagacggaactcccacctttcccggcatcccaaggccagagtatgtgaaactcctgggtctctatgtgtgtctgagcggctgctctgccaacactccacacagccctgtgtcctggacccaaggcccttatgacctgagctcaagaggggatctcctgatccatgggttgcaaagatccatgggagaagcatggtttctggggcggggtcacacgctcagtcactgtttccctcggatgccggagatggttcctttggctctctgccaatacagggtgaatcatcatccatccctcttttctttgttctcccgggtcaagttgtttgcctagtcagtcccaatgtgagaacctgaatatttcagttgacgcgctgacttcaaaatccccgggcttcgggaggcggagcttgcagtgagccgagatcccgccactgcactccagcctgggcgacagagcgagactccgtctcaaaaaaaaaaaaaaaaaaaaaaaaaaaaaagtccccgggcttttcttttcactcagtggaaggcagctgcttctaattggccatcttggcccgcccccaccacgtgaccttctgtaaaatgcctccactctccaggaacgctctcattatataactttgcctgaaaccaacagcacgctcattgcacatatcatgggctcatttatttcacttataaagaacctggccaaggaagagatagtgcctaaagtggccagtattctgaccgatatgttagaaaaatggtgtgccgaccaattcatgacatgtgtcccaaaactagcaacggaaattgtattcgccgtgttgaggtctctaatccagatgatgctcatctatgtactggaaaaggcagagtcctttcctgacaagctgctgaaactcttcagaaacatctcatatttcctgaagaagatgatgtctggacaagcagcacaggtcgttcagatttaactttctattcatatatccagcacgatattcgcacaattgtcacgaaaccttaccagttgatgagtcctgcacatttcctttaatttcaggaggaagagggtaatccggatgagttttctgacctactctgctgctgtgattaaacaaccaccaggaaattttgacgacactgttctcctgagctcctccctttcctccgggaacaaaacaattgaatttacaaaaataaagtgttatttgactggagtgaggtctcatgtctgcttatgcggtggctcgctgctcagaacagggtgagtctctgggttgtgtgctgaggaggggaggctctcaatctggagaaaacccactgcaggggacacctccatggggtctgagggactgaggatgaggagccggactgggtctagggaaggaggaggtttcagagggtgaaattctggcactaaagcctgggggtgtttgggaacttcctccttccgaagaagtttcagggagggataaagacaaaccctgggctccttgaggggcccttactaatttgagaggactctatcgggaaggagagtgacaatggcctccttgaggactgaggcccctgaataaatgaggcccagatacagtccatgggggatgagaccttcaagggtcacattttggttgggacagaggaaaagtgcagctctgcagccgcagaggaaaacccggcagtgtgaaagcgaccttggaggggccctgtgcgctctgaatgcgtctgagcccccatcccctgtccccgcctctctttctggattcttccagctcggctgtctccgccatcttctgagcgctccaccctgacttattcaagtttcccttctgccttccaagtactccaaaatctttcagatctgtgtccctacccctgtttttagcatgtgttggggctccaggtccctgaaggtttctggcctgaaatccacctccccagcggagtggactgcgttctagagactccacactccgcgaggttcccaggcccctgagggacaaccgagtggcctgcgcacttcagggctccacactcggcaaggtctttcaagcccttggggtccccttcttagttttttccacctttctgggctgcagtcactccataaatgctgggatctgatccccacccccactctcgtttcctcaattctgcgggctacacgctctggcaaggtcctccgggccctggatcccctccctctccctatgcccacgctcctagtcagcccttctggggtccactattttcaggaactaaccgttctcatggagccttgctaaccggaaagctgtgtggaagaaaggctttgaggatagaggtggagatttggctcttccatagtgccactcacccaccccaccatgctgccactgccagacccggacccctgtttcagaacaagtgaccagattcgctcctggacagccctggacactggccttttctctgaaaactactcaccctttctctagtccccacttcatgccagcctcataccctcttccttcccccacgctggcttccgggatcctcctctgctcagacaacctcttctgtgtcccacccccgtttttagaatgctttggggcaccaggttgggggaaggtttctggcctgatatccatctctttccaaactcccttcttcccttgaaaggcttcttgccttcagccccacttctggctccgaggtttcaggacaccctcctcttcatcctcattcttttgaccaccagctttttaggaattcgaacgtccctctcatcttcgtgaatcctgtccaggcatttgttgaccccttcatctgatacccctgacctcacattgccaaaagtctacccctacccagtacactggaattagacaaaatcccaggagttttacctcaactctgagtgtgcccacaggagctctccctgaagccacgtccttttaagcagggtctagggttcctcccttgtcttaatgaactctttgtcacacggaggacgttatggagcccttatgatctttcactgcctttctgcccagcgttttgtctttccatggacatttataatattttccatggacattttgttctctcaatgtccacccctaatttccaacatcccaaagattctcatgtgtttcctgaaagccatttacaggaatggctgtgcccagacccccttccccaggatcctccttcacacctggtaggtgcctctcctagagagatttgcactcagttgtcgtgcagtcacatggcccagatggttgttaatcacccccttcctggcaacagctagcagccagggaatcactggcacagaaacctcagggtgaccaagatgaggccacctctgtgctgaaggctgtgctccagagcctgcttgggatcaggcttaagcaggtcttcagccagacctgatgttacctggtttccttgagctgccctgcctgagctatcgggagcactccctcaatgcacatcttgattccctatctcatgctctgcttctagaaaccatgagctatcaattgctactggcaatggtcctgggaagtcaaccctaagtatggattctggggttggatgactccccacaggacttcagtgagcaacaatcactgctggcagttggaggacagagtcgctagggcatgtgaccactgtgaaaccaccgatgtttcacctggggtaattttggatgaactacggtagaagcactgaaggtacattgcttttggtttggaagattgtaggtaaataatagcgatatgaatgtggaattggatggctgcaaacgagtgccattgatgcattgaaagaggaaaagtcaggctgtcacctgtcactcagcaatttaaagtgtgagagttgggactagatgtggtggctcacatctataatccagagattcgggggaagcttgaagaggtaggatcttttgagtccaggagttccagaccagcctggacaccagagcaagacctcatctctacaacaaaattttcttaaaaattagatgggcttggtggcacgcacctgtacttgtagatctagctaatggggagcatgagataaaaaaatcacctgagtcagggacttaggggttacaatgaggtatgattgtgccagtgcacacactcccacctggccaacagagtgagattctgcttccaaaaaaataagaaataaatcaggtttgagagttggaaagcatcatcttctcctagagccaaaggacatgtacaactgagacccaggaacaaagcttcatcacaaagagaccatcatcagtggagccgggagatgcattccccctcaccctgccttgaggaggcagtggagtcatctgtctgggatcctttctgacccagccctatttgtttgtctctttggcttctttggatttgtatattttagctgttataacactgtaaaacaaacagagtgatttttttgagttgtgtgaatgatgctagctccatagtcaccctgagagtgatgggaacttttgaatttgtggcaagttggagggtagtgtaagtgacctgagattgccaaattggggctagcactggatgtgaggttaggctagtggaaaaatatgcccagaaccagaggagtgtgggctcactgcaggtggttaggctcagatccaaattgtacagatggatagctttggggtaaagaataacatagttgagaagtgcatgtgttagtctgttcatgcactgctataaagaattacctgagactgggtaattatttataaaactcaggtttaattgggtcatggttccacaggctgtacaaaaagtatgatgctggccatcagctcaacttctggggaggccccagaatagttagagtcatggcaaaaagtacaagggaagcaggctcatcttccacggccagagctggagcaagtggtaggagaggtgatacacactttcaaacaagtaggtcttttgagaactccatcaccggacagcacctatgggatggtgctaaattattcatgaaatatccgcctccataatccactcaactgtcaccagcgcagccagccccacctccaacagtggggattacaattccatatgaggtgtgggtggggacacagctccaacctcaatcagtgggcatcctggattgggtctactatagaaggagaaccaggagctgactatgatcttgaaccctacccatgatggccgggcggggtgactcatgcctgtaaccccagcactttgggaggctgaggtgggtggatcgcctgaagtcaggagttagagaccagcctggccaacatggtgaaaacctgtctctactaaaaatacaaaaaattagaccggcgttgtgctggatgcctgtaatcacaccactacgctccagcatgggaaaaaataccaaaacttcgtctcaaaaaaaaaaaaaaaaaaaaaaaaaaaaagactgcccatgaccactgcaccagtgagagggacaccagcatcactgagatgcaagggctggacattcttcataggtcagagctcaaagcaggggacactgatacagagatgggctccatccatagcaccaaagtggtgagaggatgtgggaatggcagaggccagcactttgccatcaatgcaagggggtataaggaggtgacaccagtgccagagtacatcacggggggactgccctacaatatctaggacttacctcttagagcgtgtttcattagcgacaacagatataaatggcagacaggtgtgtccctgcattaacaggaaatagaaatcatcaagaggaacagaaggcagatgtcagcagccccttagaaagtcatcatccttcatacagttaaaatctgagacagttctcacacgagaaggcctaactcaaaaagaggctgggttctcatgaggcaggtttatgcaaaaccaaggaaggtgtacaagtttggaattctccagtttcccttggaaaagacctacagtcatttgcttaggtaactgagcactgaacaaaggtgagtattgttgtcttttagaagctcttggccaagaaggccttgttggcataaaacccatggtttggaaacatcaccatgacccctgttagagtaatggcctaagggtgggggtcaggaaattgatgtattccttgccaacttctgcctctaagtgagtgaactctgtttgtgaacctctctcctctgtggttatgttcctaggctctcatgtataatcaggagtcatagacttagaaacaggaaaaatacttacagtgtttttgtggcctgtgagctatgacttataattttaggaaaaaaacaattgcaaatggaaagcctaagtctatcaatgctcatccaagacaacataatcaataaaaaccaatatcaaatctcaaggcaaattatttcctgtatatagatggcagagatgagcaccaccatcaaaaactcaaggaccagtgctgtgggtccagtcatctgtttcatggaattcaccagtctggtatcttcaaaatccagaaggatgatggcagatggcaggaaagtaatgcaaacgtcatcaggtgtgaccccactgtagcagctgtgatggatgttttctctcaccatagcaataaataacacaacctcggtcacactgtatgcattgttggtctgcaaaatccatgttttgcaaaactcttcaggaaggtggatctgtaatattggcattgacatgagaacaacagcagtatttattcacaatctcaagctctctgtcttcccgtctctctcattagccatccaagtagtcctgaggaaccaagcccatcagaacattctgcaacataatacacagctccattctccattcaaattttgttgttgttgttgttgttgatgagacaacatcttactccatcagccaggctgacgtacagtggggctatctgggctgactgtagtcttgagcttccaggctcaaggcatcctctcacctcagcctcctaagtggcttgaactacagacacacagcgacatgctgggctagtttttgtatattttgtagagacgtgctctcaccatgttattcaggctggactcaaactcctgagcgtaagtgatccaagcaccttggcctcaaagtgctgagattacaagcctgagccactgcacccagcccaatctccattctactgataacaatgtcattaccaggtctgatggacaggaaatggtaaggtttctgaaaacctaaggatcacacagcgagttccaaaggctgaaagtgcatacctgtcgacactgataccaatgacatccaatggtgagaatgacattccttgtagtcctagctctgctcataacaaatctatactgaagtgtaagagtttgatggtcatggggattttccatgtctctgcctttcagcgatgtgccatatctgtgaagtgttcagaaatgcaacagcctgaggcatgctgggcatatcctctaataaaaaggaaaatgccattttatggtcctgtatttctacaagttggaacacatgggcctgtgatccagatgggggaaatgggaatattcccactcattcaccttcatccacgaagcccatttgaaagctttgggcttcccatccttgtagattttagtgttgtgggctgggtgcagtggctttcacctgtactgccaacactttgggaggcctagacaggtgaatccactgaggccaaaagttcgagaccagcctggccaagatggtgaaaccccgtccctactaaaaatacaaaaattagcaaggtattggggccagcacctgtaatcccagctgctcgggaggctgaggctggagaatcgcttgaacccaaaaggcagagactgcagtgacccgatcctgcctttgcactccacctgggcaagcagaacaaaacttctgtcttgaaaaaaaaaacaaaaaacgaacaaaaaagatgttagagttctgggtttagaggtctataccccagaaagagaatggtttcaacaagggacaaagaagttgctttaaacgttgacttgccatttcttttcagtgtgtttgttctcttgcgtcaagagaccaccagaaaagtggtgcaattactctcctgtcaagaatcattgactatcatctgcaagagggtcagatcctggtatataattagggcagaaatacttagtctgagaagggtatgacatccagaggccctattaatgatgtccttttctccatgcctgactctgaccccatgtgctggactgcccctgtgtggatggcctcatggcctgctcggactctgaggtcccaccccaagtggcacctccatggagggctctactcttgtatgggctctgacactcacactgagacactctcccatggacacctcttcacccacttggggtctgaaactgggctactccatccctccctaacctggaacagagagctttcactgctattacacaagtcatagaggctaactcctcatttttccaagctaattattgaaacattagtcctgggttgataagacaagataagttaacttttcataaatttgcttatcaagttttgaataaattcaaataaattcaccttccccacacaccttagttgtcgacatcacacgcgcacccatactcacagggtgagcacgaaggcttcactgtcagtggagaaagtggcaaaacccttctgtgcctcatcctggtctagacctggccctcatcctttcccactcttcccctcactcccttggattcatccacactggcctcctgcctgctgctccacctccctgcgaagctcacccctgcctcagggcctttgcacgtgcagtggcttcaagccatatcctcttcacccagatctcccagatctcctgaatgatcttcttttatcattcaggtctcagcttgcatgtaatcttctcagtgaggattacccaaaccacatagttcattcattcattcaaatattcattcaatggcatattgacaaagcagctacttcatgccaggccttgggccaggtgttatggatatggcaacaaacaaaacaagagttttctgctctcaaatttttacccacttaaaggagatatcatacatcatctgtaaataaatacatcatctgtaaataatgatgtaaataaatacatcatctgtaaatctgtaaataatgatgtaaataaatacatcatctgtaaataaataaagtataataaaagaaaatagtaggtttttttggttggaggtgaccgtgaagtttgcaaataccatcttacaacacattattttattttatttcatttcatttttaattttattattattatactttaagttttagggtacatgtgcacaacgtgcagatttgttacatatgtatacatgtgtgaagttggtgtgctgcacccattaactcgtcatttagcattaggtatatctcctaatgctatccttcccccctcccccaccccacaacagtccccggtgtgtgatgttccccttcctgtgtccatgtgttctcattgttcagttcccccctatgagtgagaacatgcggtatttggttttttgtccttgtgatagtttgctgagaatgatggtttccagcttcatccatgtccctacaaaggacacgaactcatcattttttatggctgcatagtattccatggtgtatatgtgccacattttcttcatccagtctatcattgttggatatttgggttggttccaagtctttgctattgtgaagagtgccgcaataaacatacgtgtgcgtgtgtctttatagcagcatgatttataatcctttgggtatatacccagtaatgggatggctgggtcaaatggtatttctagctctagatcactgaggaatcgccacactgacttccacagtggttgaactagtttacagtcccaccaacagtgtaaaagtgttcctatttctccacatcctctccagcacctgttgtttcctgactttttaatgatcgccattctaactggtgtgagatggtatctcactgtggctttgatttgcatttctctgatggccagtgatgatgagcatttcttcatgtgttttttggctgcataaatgtcttcttttgagaaatgtctgttcatatccttcacccactttttgatggggttgtttgtttttttcttgtaaatttgtttgagttcattgtagattctggatattagccctttgtcagatgagtaggttgtgaaaattttctcccattctgcaggttacctgttcactctgatggtagtttcttttgctgtgcagaagctctttagtttaattagatcccatttgtcaattttggcttttgttgccattgcttttggtgttttagacatgaagtccttgcccgtgcctatgacctgaatggaaatgcctgggttttcttctagggtttttatggtttgaggtctaacatgtaagtctttaatccatcttgaattaatttttgtataaggtgtaaggaagggatccagtttcacctttctacatatggctagcctgttttcccagaaccatttattaaatagggaatcctttccccacttcttgtttttgtcaggtgtgtcaaagatcagatagttgtagatatgtgacattatttctgaggactctgttctgttgcattggtctatatctctgttttggtaccagtaccatgctgttttggttactgtagccttgtagtatagtttgaagtcaggtagcatgatgcctccagctttgctcttttggcttaggattgactttgcaatgcggggtcttttttggttccatgtgaactttaaagtagttttttccaattctgtgaagaaagtcattggtagcttgatggggatggcattgaatctataaattaccttgggcagtatggccattttcacgatattgattcttcctacccatgagcatggaatgttcttccatttgtttgtatcctcttttatttcattgagcagtggttttagttctccttgaagaggtccttcacatcccttgtaagttgggttcctaggtattttattccctttgaagcaattgtgaatgggagttcactcatgatttggctctctgtttgtctgttattggtgtataagaatgcttgtgatttttgtacattgattttgtatcctgagactttgctgaagttgcttatcagcttaaggagattttgggctgagacaatgggttttctagatatacaatcatgtcgtctgcaaacagggacaatttgacttcctcttttcctaattgaataccctttatttccttctcctgcctaattgccctggccagaacttccaacactatgttgaataggagtggtgagagagggcatccctgtcttgtgccagttttcaaagggaatgcttccagtttttgcccattcagtatgatattggctgtgggtttgtcatagatagctcttattattttgagatatgtcccatcaatacctaattattgagagttttcagcatgaagggttgttgaattttgtcaaaggccttttctgcatctattgagataatcatgtggtttttgtctttgggtctgtttatatgctggattacatttattgatttgcatatattgaaccagccttgcatcccagggatgaagcccacttgatcatggtggataagctttttgatgtgctgctggattcggtttgccagtattttactgaggacttttgcatcaatgttcatcaaggatattggtctaaaattctcttttttggttgtgtctctgcctggctttggtatcaggatgatgctggcctcataaaatgagttagggaggattccctctttttctattgattggaatagtttcaggaggaatggtaccagttcctccttgtacctctggtagaattgggctgtgaatccatctggtcctggactgtttttggttggtaagctattgattattgccacaatttcagatcctgttattgctctattcagagattcaacttcttcctggtttagtcttgggaaggtgtatgtgtccaggaatttatccatttcttctagattttctagtttatttgcgtagaggtgtttgtagtattctctgatggtagtttgtatttctgtgggatcagtggtgatatcacctttatcattttttattgcatctatttgattcttctctctttttttctttattagtcttgctaccggtctatcaattttgttgatccttttaaaaaaccagctcctggattcattaattttttgaagggttttttgtgtctctatttccttcagttctgctctgattttagttatttcttgccttctgctagcttttgaatgtgtttgctcttgcttttctagttcttttaattgtgatgttagggtgtcaattttggatctttcctgctttctcttgtgggcatttagtgttataaatttccctctacacactgctttgaatgtgtcccagagattgtggtatgttgtgtcttttttctcgttggtttcaaagaacatctttatttctgccttcattttgttatgtacccagtagtcattcaggagcaggttgttcagtttccatgtagttgagcggttttgagtgagtttcttaatcctgagttctagtttgattgcactgtggtctgagagacagtttgttataatttctgttcttttacatttgctgaggagagctttacttccaagtatgtggtcaattttggaataggtgtggtgtgatgctgaaaaaaatgtatattctgttgatttggggtggagagttctgtagatgtctattaggtccgcttggtgcagagctgagttcaaatcctgggtatccttgttaactttctgtctcattgatctgtctaatgttgacagtggggtgttaaagtctcccattattattgtgtgggagtctaagtctctttgtaggtcactcaggacttgctttatgaatctgggtgctcctgtattgggtgcatatatatttaggatagttagctcttcttgttgaattgatccctttaccattatgtaatggccttttttgtctcttacgatatttgttggtttaaagcctgttttatcagagactaggattgcaacacctgcctttttttgttttccattttcttggtagatcttcctccatccctttattttgagcttatgtgtgtctctgcacgtgagatgggtttcctgaatacagcacactgatgggtcttgactctttatccaatttgccagtctgtgtcttttaattggagcatttagcccatttacatttaaggttaatattgttatgtgtgaatttgatcctgtcgttatgatgttagctggttattttgctcattggttgatgcggtttcttcctagccttgatggtctttacaatttggcatgtttttgcagtggctggtactgactgttcctttccatgtttagcgcttccttcaggagctcttttagggcaggtctggtggtgacaaaatccctcagcatttgcttgtctgtaaaggattttatttctccttcacttatgaagcttagtttggctggatatgaaattctgggttgaaaattcttttctttaagaatgttgaatattggcccccactgtcttctggcttctagagtttctgccaagagatcagccgttagtctgatgggcttccctttgtgggtaacccgacctttctctctggctgcccttaacattttttccttcatttcaactttggtgaatctgacaattatgtgtcttggagttgctcttcttgaggagtatctttgtggcattctctgtatttcctgaatttgaatgttggcctgccttgctaggttgcagaagttctcctgggtaatatcctgaagagtgttttccagcttggttccattctccccatcactttcaggtacactaatcaaacgtagatttaatcttttcacatagttccatatttcttggaggctttgtttgtttctttttactctctttcctctaaacttctcttctcacttcatttcattaatttgatcttcattcacttatatactttcttccacttcatcaaatcggctactgaaggtattgcatgcatcatgtagttctcatgccatggttttcagctctatcaggtcatttaaggtcttctgtacattgttttctctacttagccattcgtctaatcttttttcaaggtttttagcttccttgtgatgggtttgaacatcccctttagctcagagatgtttgttattactgaccttctgaagcctgcttctgtcaacttgtcaaagtcattctccatccagctttgttccattgctggtgaggagctgcgatcctttggaggagaagaggtgctctggtttatagaattttcagcttttctgctctggtttctccccatctttgtggttttatctacctttggtctttgataatggtgacctagagatggggttttggtgtggatgtcctttttgttgatgttgatgctgttcctttctgtttgttagttttccttcgaacagtcaggttcctcagctgcaggtctgttggagtttgccggaggtccactccagaccctgtttgcctgggtatcaccagcggaggctgcagaatagcaaatattgcacaacagcaaatattgctgcctgatccttcctctggaagcttcgtctcaaaggggtgcctggctgtatgaggtgtcagttggcccctactgggaggtgtctcccagttaggctagatgggggttagggacccacttgagaaggcagcctgtccattcacagagctcaaacactatgctaggagagccactgctctcttcagtgctgtcagatggggatgtttaagtctgcagaaatttctgctgccttttattcagctatgccctgcccctacagatggagtctacagaggcaggcaggcctcattgagctgcggtgggctcctcccagttcgagcttccagaccactttgtttacctactgaagcctcagaaatggtgaacacccctcccccacccagtctgccgccttgcagttccatctcagactgctgtgctagcagtgagcgaggctccatgggcgtgggacccactgagccaggcacaggatataatctcctggtgtgccatttgctaagaccattggaaaagcacagtattaaggtgggagtgtcccaattttcccagtacagtctgtcacgggttccctcatctaggaaaggtaaatcccctaaccccttgtgcttcccggtgacgcaatgccccaccctgcttcagctagccctccatgggctgcatccactgtccaaccagcccaatgagatgaacaaggtacctcagttggaaatgcagaaatcacccatcttctgtgtggatcaggctgggagctgcagaccggagttgctcctattcggccatcttggaatggcaatctatgtttgctttttacatttgaaaaaactggtgtcacgtacctaggtattaatcattgtggtatcctcttgccgatttacctctttatcattaactagtgaccctccttgtcttttgttgttacagtctgtgattttagtctattttatctaatatgagaatagctactctggcacttttttggtttccagcttcatgaaatatccttttccatttccctgttttcatttccctttcggtgtctctatagatgaagttgatttctttaaggcaccataagttgggtcttatttctttatccatttgaccatttagagaatttagaacactgtcagtgttattattcataagtaaaaacttaagagtgggtgtagtggtgtacatctgtatttcctgcactttgagagactgaggcgagctgatctcctggggtcaggagtttgagaccggcctggtcaacatgatgaaaccctgtctctactaaaaatacaaaaattagccaagcatgctggcatgtgcctgtaatccaatttacttgggaggctgaggcaggagaagcttgaacctgggagacaaatgttgcagtgagctgagatcacacagagaagtcatctccactctcctcatcagaacctcttgttcacagcatttgtgagcacaaatcaatgatggttattctttcctactaattagggatattttattacacagcaatagcctccagcaaagggaaccatcatacatgattcctacaagttgacagggctggaattatcactgaaaaactaaggtggctatacttgattcccaatgtccaatttttcatgaatagagaaatttatcctttttccccccagccagaaaccaagttttgctcttacgcccaggctggaatcaagtggcacaatctcagctcactgcaacctctgccccccagcttcaagaaattcaccttttgaacaaggagatattaaggatacactatgtgtatgctaccggtggttgcaggagactcagaaaagagagaaacagtcactggcctcgtgcaactgatattctcgggaggagagaaaggcaatcaagaaagaaacatgctgtatttcagacagctgtaagtcctccacaagaaaagaaagcaggtgaggaacataggaaatgtgtcaaccataaggttcccgctaattctataagttggtcagggatatcctccaagaataagcagcatctgagcaatcacctgaagggaggaaggaaggaagactgtgagtggtggcttacacctgtaatcccagcactttgggaggccaaggagggcagattgcctgagctcaggagttcacgaccactcagagcaacctgttgatacccaatctctactaaaaacacacaaaaaaattacccgggtgtggtggcacgcacctgtagtcccagcttccatgcccagctgatttctctctctccatatatatatatatatacacatatattgtttttgcagagatagggtctcactgtgtcacccagtcatcaagcaattctcttatactgttttggaaaagcatgggaattacaggtgtgaaataccctgctggtcctgaaaaatgtgatatttgggattctctgcctggcttgttttacccaaaataatgacctccagttccttccaggttgctgcaaaagacatgattttcactgttttataactgaatagtattcctgtatgtatacataccacattttctttatttattcttctgttgattgacatgtagggtgattccatgtctttgctactgtaaataatgctgcagcaaatatttgtgtgcattttgatctattcctttgagtaggtacccagtactgcaactgcaggactgagtagttgttatattttttgttctttcagaaatctccatagtgtttgccataaaatctgcactaatttacattcccaacaacaatgcataagatttccccttttctccacattctcactaacatttgttatgtttttgtctttttcataatacccattctgactggagtaagatatctcattgtggtggttgttgatatttttgagacggggtctcactctgttgccagactggagtgcagtggtgtgatcgtggcttgctgcaacctccacctcccgggttcaagcaattctcctgcctcagcctcccgagtagctgggactacaggcgcgtgccaacaggcctggctcattttttgtatttttagtaaagacagggtttcaccatgttggccaggatgatcacagtctcttgagctcatcatacacctgcctcagcctcccaaagtgttggaattacagtcatgaggcagcgcacccaacctcaatgtggttttaatgaccatttctctgacgattcatggtgtggagaatttctttgaaataccttttggccatttatatgtgctcttttaaaaactgactcctgtccaggtgcggttgagcatgcctgtaaccccagaacttcgggaggctgaggccaatggatcacttgaggcaaagaggcagaaatcagcctggccaacaaggcaaaaccccatctttactaaaaatacaaaaaatcagccacgggctgtgactcgtgcctgtggtgcaagttactcaggaggttaaggcacaggaattgcttgaacccggtaggcacaggtcacagtgagccaagatcatggcactgcactacagcatgggtaatagagaaagacctgtctcataaaaacaaatgaataaataaataagataaaaaataaaaaagtctctttatgtcctttgccgactttttaatgggattctttggagttttctgttgtagttgagatctttgtttactctcggtattagtcttttgtcaaaggaaaagtttacaaataatttcttccgttctgcagtttgtctgctcactctgttgagaggattatttctttggctgtgcagcagctttttgtttcagtaaagcttttgaatttatataattaaaattttcagtttggtttaaatttgcactggtcgatttttggttttgttgcctgtacttttgaagtcatactcttgaactctttactagacaataaccagaagagttttctctagttttcttctcacatttttattatttcagtacatatatttaagtctataattcatcttcaattgatttttgtagaaatagtgagaaataggagtccaggtttattcttctgcaaatgacaattcaattgttccagcaccaattattgaaaagggtgtgctttcctcaacgtatattcttatcagctttgtcaaagatcagttggctataaatgtgtggctttctttctgggctctctagtctgttacatcaatctgtgtgtctatctgtatactactaccatgctgtattggtgatgatggctttgtaatataatttgaagtcaagaaatgtgatgctcccagctttgtttatttgcttcagaaaggctgagtcaacagctgcagagatgaagctgcccctcctcgcagggctccttcccggaaaaagatcatggctcccactgaccatataaccatggctggaactcctgaaattcccaaagggaggccctacccagtgaggggggatgaatgaaggtcctacttaaggaatctgtctggccacaatcaggcacagcagctgtgctgccttgtgggggaccagaccacctggattccctggagcctgcaggctagaatgtctgagtccatggaaacacagaaatggaggccgccctcacctccccagaaaactgtagtctcaggcagtctccagccgattgccactggttggctgctattccaagccagtgggtcttaacttgagaggtgctgtggaagtggggcccacggaatgaggctgcttggctccctggattcagccccttttctaagggaatgtacagatggaactcccgccttgcccagctttccaagtatataaaactcctgagtctctgtgagtgtctgagcgagtgctctggcaacattcgacacggctctgtgtatctgacccaagacccttatggcatgagctaatgggaggatcttctgatccatgcgtggcaaagatgcatgggagaaacatggtttgtgggtaggggttgtgcattcactactgcttctcttggctgtaggtgaaggtttctttggctctgtgctgatactgggtgcaccatcacccaccccctttgtttcttctcctgggtcaagtcatttgcctaatcagtcccaatgtaggaacctggatacttcagttcaaggtgctgaattcaccgtgcttttcattcaggggaagacagctgcttctcattgggcatcttggcctgcccacttcacgtcactttttgtaaaatccacaccactccaggaatatccattacttaacttcgcctgaaataaacagaaggctcattacacttatcatgggctcacttacttcgcctataatgaaggtgccatggaaatgctagtggatgacgtggtccattttcttagggatgagatagaaaaatggtgtatggctttttaatttaattaaaatttttagtttggtttaaatttacattggtctctttttggttttgttgcctgtacttttgaagtcttactcgtgaactctttactggacaatgaccagaagagttttccctaagtttcttctgatattttgaccatttcagtacatacatttcagtctataattcactttaaattgatttttgtaaacatggtaagaaataggagttcagatttattcttccgcatatgataatgcaactgtcccagtaccaattattgaaaagggtgtgctttccctagtgtatattcttgtcagctttgtcaaagatcagttgcctatgaatgtgtggctttcattttggattctctcgtctgttacatcaatctgtgtgtccacatttatacctgtaccatgctgtattggtgactatggctgtgtaatatattttagagttaggaaatgtgatgctcccagctttgttcatttgcttcagctgaaaaggttgagtccacaattacaaagatggcagccgcccatccccggaggacctccaacccagaaagagatcaggcttcccaccaaccctataaccctggctggagttcctgaaattccaacagggaggaccttcccagtgaggagggatgaatcaaggtcaaatttaaagaaacagtctggccactatcaggcacagcagcagtgctgccttgtgggggacccctcctgctccagaccagctgccctccctggagcccgaaggctagattgtctgagtctacggaaacagagacggtggccgccccaaccacccagaactcggtagtctcaggcacttggcttgctatcttgccactgcttggctggtattccaagcccgtgggacttgagaagtgctgtgatgatggggaccacaggatgaggctgtctggctccctgtgatatggctgtgatgagtggaggaacaccagggctcatgtctcacacagaattggagaaaatgacacaaacacatgtacagtggttttatggcgtgcagtttaataggcaagaacgaaggaagagctccccatactgagacagagggaggggggctccaaagccaaaagaggaaacccggagtgctgtggataccaatgagttatatgaagaaactggagggggcggtgtctgatttgcatagggttcaggcgattggttcgaccaggcatgtcatttatgtggcccacggaaaaactggccctcccacctagcctttgaatatgcacgtgccggacaccctgatttcctacactcatggggatatatgggggtggccatatcgccaggcacaggtggggacaagggccagaagagggcgggaatcgctatgtttgggtggacccagtttctaatggccggcatctgcagatcaaggttaccggagaactctaaaagccggggctttcctgctagacaagactcatttctggagctgctttaaaaagaaacaaaacttcccaaggaccccttttcctccctgtctgcccaaaataatttcttaacaactcgtataacacctgaattcagcccccttactgggggaatgtaccaacggaactcccacctttcctggtttctcaaggctagattgtgtaaacctcctgggtctcggtctgtgtctgagcagctgctctgccaacactccacacagccctgtgtactaggcccaaggccgccgtgactcagcccatgggaggatctcctgatttcttggttgcaaagatccatgggagaaaaatggtttctggggcggggtcacacactcatggcttctcttggctgtgcaagaaggttcctttggctctgttccaatatagcgtggttcatcacccacccctgttttctttgttctcctgagtcaagttgtttgcctagtcagtcccaatgtgagaacctgaatatttcagttcacgtgcttatcgtgaaattcactgagactttaattcagtggaaggcagcctcttctaattggccatcttggcccgccccctccacgtcacctcccataaaatggccacgctctccagggacgatgccattatatatctttacgtgaaaccgacagaacacttattacactttttgtgagctcatttacttcacttataatgaacatggccatggaaatgctagtggagaaagtggtcgattttctgatggatgtgataaaaaaatggtttgccgaccaattaatgacatatgtctcaaaactagtaacgagacccttaatcgctgggttgaagtttctaatcaagaagatgctcatctatgtattcaacaaagcagcttcccttgcttctgaaatgcttccaaacaacatctcatatttcctgaagaagataatgcctggacaagcagcacaagtcattcaggtttactttcagctcataaatccagcaggatattcgcacaattgttgggaaaccttatcagttcatgagtcgtgcatgtttcctttaatttcaggaggaagagggtaatctggaagagtttcctgacctactctgctgctgtgattaaacaaccaccaggaaattttgatgacactgttctcctgagctcctccctttcctcggggaagaaaagcattgaaactacaaaaataaagtgttatttggctggagtgaggtctcatgtctgcttatgcggtggctcgctgctcagaacagggtgagtctctgagttgtacgctgaggaggggaggctgtcaatctagaaaaaacccattgcatgggacacctccatggggtctggggggctgaggatgaggagctggactggatctagggaaggaggaggtttcagagggtgaaattctggcagtaaatcctgggggtgtttgaaaacttcctccctcagaaggagaagactcagggaggaataaggacaaaccatgggtcccttgaggggcatttactaacttaagaggactttatcgggaagcagagtgacaatggcctccttgaggactgaggcccctggataaatgaggcccagatccagatccagtccatgggagatgagaccttcaagggacatatttttgttgggacagaggaaaagtgcagctctgcagctgcagaggaagccttggcagtgtgaaagcgaccttggagggggccctgtgcgttctgaatgcttctgaggtccatcccctgtccccgcctctttttctggattttttgggctccatggtctccgccatcttctgagcgctccacgctgccaccttcagttttctcttctgggctccaaatactccaaaatctttcatatctgtgcccctacccctgtttttagcatgtgttgggactccaggtccctgaaggtttctggcctgaaatccacctccccagcggtgtggattctgctctagagaccccgcacttggcaaggttcccaggcccctgggggacaaccgagtggtatgtgcacttcagggctccacactcggcaaggtctttcaagcccttggggttccctcctcagttttcttcacatgtctgggatgtagtcactctataaatgccgggatgtgatccccaccccagtgattttttttagttccatgagtgttgctatctgaatagtcatcctgagagtgatgggaccttttgaatttgcagcaagttttagattagtgtgagtggcctgagatcgcaaaactggggctagcattggatgtgaggttaggctggtggaaaaatttgcccagaacctgaggagtgtgggctcactgcaggtggttaggatcagcacagaattgcaaggatgtatagctttggggtaaagaataacatggttcagaagtacatgtattagtcttttcatgcattgctataaagaattacctgagactgggtaattaattataaaaactcaggtttaattggctcatggttccacaggctgtacaaaaaggatgatgctggccatcagctcaacttctggggaggcgtcagaaaacttagagtcatggcaaaaagcacaagggaatcaggctcatcctccatggccagagctggagctagtggtaggagaggtgctgcacacttttgaacaatcagatctttttagaactctatcaccagacagcacctagaggatggtgctaaattattcatgaaatatccacccatatgatccactcaattctcaccggcccaaccaggaccacctccaccattggggattacaattacacatgagatgtgggtggggacacagatccaaactcgatcagtgggcatcttggactgggtctactatagaagaagaaccaggagctgactatcatccttaagactgcccatgatggccaggcagggtggctcatgcctgtaatcccagcactttgggaagccaaggtgggtgaatcccctgaggtcaggagtttgagaccagcctcgccaacatggtgaaaccctgcctctactaaaaacacaaaaaattagatgggtgttgtgccagacgcctgtaatcacagctactccagaggctgaggcatgagaattgcttgaacctgggaggcggaggtggcggtgagccccaatcgcactgctacactccagcatgggcaacaataccaaaacatcgtctcaaaaaaaaaaaaaaaaaaaaaaaaggctgcccatgaccactgccccagtgagagggacaccagcatggctaagatcaagtgctggacattcttcatgggtcagacattaaagcaggccacactgttacagagatgggctccattcatagcaacaaagtggtgagaagatgtgggaatggcagaggccagcactttgccatcaatgcaaggtgggcataaggagctggcaccagtgccagagtgcatcaggggaggactgctttgcaatatctagcacttacctcttagagtatgtttcattagggacaacagatataaatggcagacaagtgagtcccttcagtaacaggaaatagaaatcatcaagaggaacagaaacagatgtcagcagccctcatataaagtcatcatccttcatccagttaaaacctgagacagttctcacataagaaggtctaattcaaaaagagactgggttctcatgaggcaggttcatgcaaaaccaagggaagtatacaactttgggattctccagcttcccttggaaaagacctacaatcatttgcttaggtaactgagcactgaacaaaggtgagtattgttatctttcagaagctgttggccatgaaggtcttgctggcataaaacccatggttggaaacatcaccatgacccctgttagagtaatggcctaagggcaagggtcaggaaattgatgtattccttgccaacttctgcgagacgagtgttggtccactcatctctttcacggaattcaccagtctggtatcttcaaaatccagaaggatgatggcagatggcaggaaactaatgcaaacaccatcagttgtacctccactgtagcagcagtaatggatgttatctcttcattgtaatatccagggagggagaagatgacattattctcaatattctaaacaccctgtgtgtacagcctctgtgatattttttgtaatatccgtgtgggagagaattatattactcctaatatctcaggggttgtgccccctctgtgacaatgttcctaacacccaggaggggataggatgatatcacttttagcatcacagggggtgtacaccccactgtaatattgttcataatatccgggggggagagaatgatattactcccaatatcgcaaagactgtacaccaacctgtgatattatttgtaatatccataagaggaagaataatattactcccaatgtcacaggaagtgtacacccttctgtgatattgttcaaaagatccagttagggaggggatgatattactctcaatatcttaaacaccctgtaggtaagccctctgtgatattcctcataatatccagagggagaggatgatattactcccaatattgcatgaagtctacaccccacctgtgatattgttcctaatatccaggatgggagaggatgatattactcccaatgtcgcaggggatgtacaccttccctgtaatattgttcgtaatatctagaaaaggagaggataatattactttcaacatcgcagggggtgtacaccttccttgttatattgttgctaatatccagggaaaaagaagatgacattaccaccactattgcagaaggtgtacacccccccttgatatagttcctaatatccagaaaaggagaggagatattactccaaatattgcaagaggtgtacattcccctgtaatatttttcctaacattcaggaagaaagagagtgatattgcccttaatattgaagggagtgtgccccccccgtgatattgtttctaatatccaagaaatgaaaggatgatattactcccaatatcacaggggctgtacagccccctcccatgatattgttcccaacatcggggggggggtgaaatagtattattcccagtatcacaataggtgtacacacctgtcgtgatattgttcctaatacccatgggggaaaggacgatattattcttaatatctcagagggatgtacaccctccctgtgatattgttcctaatatccggggtgggagaggatgatattacccccaaaatctcaaagggtgtacacccctcttgtgatattgttcctaatatccagggtggagaggataatattattcccaatatccaggaaaggaaacgatgatgttactgtgaatattccagggggtgtcctcccctctgtgatattgttcctaatatccaggttggggagattatgatatttctccaaatatcacaaggggtgtacaccaaccctgtgttattgttcctaatatcgatggggggagaggacgatattactcccaatatcacagggggtgtacaccacctttatgatattgttcctaatatccatgaagaaagaggatgatattactttcaatatcgcaggggatgtacactccccctgtgatattgttagtaatacctaggagaagaaagtgtgatattactcccaatatcgcaggggatgtacacgcttcctgtgatattgttcctaatatttagggggaaaggggatgatattactcccaatatcgaatggtgtgtacacccccccgtgattctttttttttttttttttttttttttgagatggagtcttgctctgccgcccagactggcgtgcaatggcgcaatctcggctcactgcaacatttgcctcccaggttcgcacgattctcctgcctcagccttcggagtagctgggattataggcagctgtcaccataccaggctaatttttgtatttttagtagagttggggtttcaccatgttggtcaggctggtcttgaattcctgacctcaaataatccacccaccttggcctcccaaagtcctgggattacaggcataactttccctgtgatattcttcctaatattcaggaagaaagaggatgatattgctcccaatatcgcagagagtgtgcactcctcctgtgatatggttcttaatattcagaggaggagaggatgatattactttctatattgcagaaggtgtacacctccctcgtgatgtctttcctaatatccagtgggggagaggttattagtctcaaaatcacagaaggtgtaaacccccatttgatattgttcctaatattcaggggtggggagagaaaggtattactcctagtatttcagggcatgaacacccccaccgtgatatcattcctaatatccagaaggggaggcaatgatatttctcctaatatcacaaagggtgtacaccccttctgtgatattgtaaatattctgtgtgtacacccccctgtgttatagtctgtaatatccgggtgggggagagggtgatatttctccccatattgtaggggatgtacacccttctgtgatatggttcgttatatccagggaagaaaaaggtaatattgctgcccatattgtggagagtgtacacccccatgtaatatggttcgtaatatccaggagtggagagggtgatactgctccttacatcgaggaaggtgtacaccttattgttatatgattcgcaatatccaggggaggagagagtgatattgctccccatgtcgcagggggtgtaaaccctccgtgatatgattggtaatatccaggaaaggaaagggtgatatttctccccatatcgcgggggacgtacatcctcctgtgatatggttcgtaatatccaggaggaaagaggaaaatattgctcttcataacccgaggggtgtacaacccctgtgatatggttcgtaatacccagaagtgtacacccctctgtgatatggtttgtaatatccagggggttagagggtgatattgctccccatatcgcagtgggggtacacccccctggattggttcataatattcatggggggagaaatttacatttatcctcatatcagggggggtgtacaccccccgtgatatggttcgtaatatccaggggaagaaagggtgatattgctccttatatcgcggaaggatcaccctcccctgtgatatggttcataatacccagacgggaagagggtgatattgttcttcataaagcgaagggtgtacagccccctgtgatatggttcataatatgcaaaaggggagagggtgatattgctccccatatcacggagggtgtactcccttctttgatatggttcgtaatatccaggggtgtagatggtgatatagctcgccctattggggagggtgttcacccctctgtgatattgttcgtaatgtccagggaaagagaggatgatattactcccaatatcgcagaaggtttacaccactctgtgatattgttcataatatccagggaaggagaagacgatattactcccaatatggcagggggtgtagaactcctgtgatattgtttgtaatatccaggcaaggagaggatattactctcaatatcgcagaaggtttacacccctatgtgatactgttcatgatatccagggaaaaagaggatattactccctatatcacaaagggtgtacacccctttgtgatattttttgtaatatccaggggagagaggataatattactctcaatatcagaaggggtgaaaaccctcctgtgtcattgttcataatatttagggaaggagagagtgatattactccaaatatcacagtgggtgtacacccccctatgatattgttcctaatttccagaaggggagatatgatattattgccaatatcgcagaaggtgtacaccttactctgacattgtttgtaatatccagatggggaaatgatgatattactcctaatatcacagggggtgtacacccccttgttttattgtttgtaatattcaggggaagagacgattatattactcccaatatcgcagggtgtgtacaacactctatgatattgttcataatatccaggggaggagaggaagtgtacacccccccgtgatattgttcgtaatatccagaggtagagaggatgatattactcccaatattgcaggtggtgtacacctttctgtgatattgtcatgatattaagaaggggagaggatgatattactaacaatatcacaaaaactgtacactccctgtgatattgttcataatatccagaagaagggaggatgatattattctgaatctcgcagaagatatacaccaccctgtgatatggttcataatatcctaggggaaagaggatgacataactgtcaatatcgcagggggtgtacaattccctgtgatattgttcacaatattcagagggaaaaaggataatattactttcaatatcgcaggcggtgtacacattactgtgttattgtttataatatccggaatgagagaaaattttctcccaatatcacaggaggtgtacactcccctgtgatattgttcgtaatatccagggaggggagaggatactattactcccaacatctcagggagtgtaggccccccctttgatattgttcctaatattcggaagtggagaagatgatattacttccaaaatcgcagggggtgtacactccctctgtaatattgtttctaatattcatgagtggaaagaaagatattactcccagtattgcaggggacatacaccacactgtgatcttgttcacaatattcgggggggagaggatgatattactcccaatatcaaagtaggtgtacacccccttctgatattgatcgtaatatccagaattaaagatgataacgttactcccaatattgcagggggtgtacatttttgaatactgttcataatattaagagggggaggggatgatatctgtcccaatatcgcaaagtgtgtacacctcctgtgacattgtcccaaatatccagaggaaaaaaggatgttattactcttaatatctcagagagtgtacacctccctgtgatattgtttgtaacatccagaagaaagaggctgatattactcttaatatcgcagggggtgtacacccccgccccgggatattattcgtaatatccagggggaagtggaatgttcagaatgggagaggatgatattacttgcaatatcatagtgggtgtacaccccactgtgatattgtttgtaatatccgggaaaggagaaaatgacattcctccccatatggcaggggctgtacaccacctatcatattgttcaaaatatccagaaggggagaggatatgtctccaagtatcacagggggtgtacaccccgctgtaatattcttcctaatatccagggtgtgagaggataatagtactcccaatatcccagggcatgtacaccccccttgtgatgttgttcctaaaattcatggggagaaagaatattactcccaatatcacagggggtgtacatacactctgtaatattgttgccaatatgcagcaggagagaggatgatattactcccaatatcacaggggctgtacaccccgctgggatattgtttctaatatcaagggggaaaaaggatgatattactcccaatgtcgcagggtgtgtacttcctctttgtgacattgttcctaatatccaggagagaagagggtgacattccttccaaaactgaaaggggtgtacacaccctttgagatattgtctttaatatccagaacgaaacaggatgatataactcctaatactgcaggggggtacaccctctctgtgatactgtttctaatatccaggaggggaaagaaaaatattaatcccaatatcacagggggtgtacattccccctttaatattgttcctaatatccaggaagacacaggatgatactatttccagcagcacagggcatgtacacccctttgtgatattgttcctaatatccaggaaaagagaggatgatattactgtcaatattgcagggcgtatacactggttctgtgatattgtttctaatatccgggggtggagaaaatgatattactcccaatattccagcgggtgtacacccgttctatgatattgttcctaatatctgggggagagagaatgatattattgtcaatatcacaggggatgtacagattccctgtgatattgtttctaatattcacagggggagaagggtataatactcccgatatcgcagggggtgtacactccccctgtgaagttgttcctaatatccagggattgagagaatgatattactcccaatatcacaggcggtgtaaaccccctgtgtgatattgttcctaacatccagaggaaaagatgatgatattattttcaatatcacagggggtgtacgcatccctgtgatattgtttctaatatccaggggaggagaggatgatattattgttaatatcgcagggggtgtaccccaccctgtgatactgttcctaatatccggggtggaagaggataatattgctcccaatatcgcaaagggtgtacaaccttcctgagatattggtcctaatatccagggagggagaggatgatattactttcaatatcacagggagtttacacaacccctgcgatattgttcctaatatccagcggaagaagagttaggataatactattttcaaaattgctgggtctgtaccccctccccgtgatattgtttctaatatccaggaggggagaaagtaatatgactcccaatatcttagaagatgtacaccctccccataatattatttcttacatccagggggtagaggatgattttgctttcaatatcacagagggagtaaacctttccggtgatattgtttttaatatttaaaaagagagaagataaaattactcccaatacaaaggggatgtattgtgtactcccccctctgatattcttttttaatatccagatggagagaggatgatattactttcaatattgcatgggatgtataaatcccctgtgttattgttctgaatatacaggtggggagagtatgatattactccaaatatcgcagggggttctttccccctgtgatattgttcctaacattcagggagggagaggatgatattactcttaatattgcagggggtgtacccacgcctatgatattgttcctaatatccagagggggagaggatgatctaactcagaatatgacaaggggtgtacacacagcctgtgatatggttcctaatatacaggggagaaggggataatatttctcccaatatcgcagggggtgtacaaccccctgtgatactgttcctaatatacagaaggggacagcatgatattgttcctaatatcgcaggaggtgtacaacgccctgtgatattgttcctaatatccagggcgggagaggatgatattaccctcaatatcgcagggggtgtgcactttccctgttatattgttcctatgatccgggtggggggaaatgacattagtcccaatatcgcaggatgtgtgcaccgctcccccgtgatattgttcctaatatcaagggggagagaggaggatattactcccaatatcgcaagggatgtacatcctccatgcgatattgttcgtaatattcaggaggagagaggatgatattactcttaatatcgcagaaagtggacacccaccctgtgatgttcttcataatatccagggaagcagacgattatatgactttcaatatcgctgggagtgtacatcccttttgggatattgtttctaatatccaggaagggagaggattatattactctcagtattgcaggcagtgtacaccttttttgtgatattgttcctaatattcagaaagggaaaggatgatattactcccaatattgcaggtggtgtatatccccctctgatattgttccttatatcaaggaagagaaagaataatattactcccaatatcaaagacagtgtagacccctcctgtgatattgtatttaatatccatggggaaagaggatgatgttactcccaatatcgcagggggtttacacccacactgtgatattattcctaaaatccagtggaggagaaaataatattgctcccaatattgcagggtgtatacaggccctcccccgttatattgctcctaatatccagcggtggagaggatattactttcaatttgtgtagggagtgtatacccccctgtgatatttttctaatatcaaggatgggaaaggatgacattactcccaatatcgcaggaggtgtacacgccctgtgatattgttcctaatatctagggaaggagaggatgatattactttcaatattgcaggagctgtacaccctctgtggtattgttcttaatatttaggttgggagaaaatgatatgagtccaaatatcgcagaaggcatacacacttccaataacattgttcttaatatccgggggagagggtgatattactcccaaaatctctggggggtgtacacccccttctgatatttttcctaatatccagggaaggaaacgatgatattactataaatattccaaggagtgtacaccttcctaatatcctaatattgttcctaatatccaggggtgggagaggattatattactcccgatatcgcagtgggtgtacacccctcctgtgatattgtttctaatatccaagctaggagaaaatgatatcactctcaataccacagggggtgtacaccttccgcatcatattgttcctaatattcagagggaaagaagatgaagttactttcaatatcggaggggttgtacacaacccctgtgatattgctgctagtatccaggaagaaaggggattatgttactccccttatagcagggggtatacacctcccctgtaatattgttcctaatatcaaggctgggatatacgtggggggaaggatgatattactcccaatatcgcaggggttatacaaccttctgtgatattgctcctagtaaccagggcagaagaagatgatattactcctaatatcgcaggaggtgtacactcccccattatgttgttcccaatatgcagaaaaggagaggatgacattattgccagtatcgcagggtgtgtacaccacccctgtaatattgttccaaatatttagggggagagaggatgatattactcccaacatcgcagggggtgtacacacatcccctgtaatatagttcttaaaatctaggggaaaaggggatcttatttctctaaatattgcagagggtgtacactccccggtgatattgttcctaatagccgggagggagataattaaattactttcaatatctcagagagtgtacatcgcccttgcgatattgttcctaatatccagagcaaaagagaatgatattactcccaatatcttaggagtgtacatttaacctgtaatattgttcctaatatccagggggaagagaatagtattactgccaatatcgtaggggttgtacaccttttctgtgatattgttgcaaatatttagtagagggaaagaatattactcgcaatatcacagggaatgtatacttcccctgtgatattgttctgatatccagaaaaagagagggtaatattactcccaatattgcagggggtgtacaccccccttgtgatattgatcctaatataaaggaaggaagaggatattactcctcatatagaaggggttgtccaccccccttgtgatattattcctaatattcagggaagcagaggatgatattattttcaatatcacagagggtgtgcagtccacctgtgatattgttcttaatattcggggggagaggatgttattatgcctgatatcgcagtagaggtacacccctcaagtgatactgttcctaataaccaggggtgaagaggatgatattactcccaatatcgcaggtggtgtacacccccccatgatggtttctaatatacagagggggagaggaaaatattactcccaaaatcgctggaggtctacaccccccttgtgatattgttcctaatatccaggaaaggaaacgatgatattactgtgaatattccagggggtgtacacccgctttgtaatattgttcctcatatccagggtgtggagaggattatattactcccagtatcgcagggggtgcacgacgcccctgtgatattgtttttcatatccaggaggggagattattatcaatatggcaaggggtgaacaccccctgtgatattgtacttaatagttaggttggcagaaaatgatattagtctcgatatcgcagggggtgtgcactccgcctggtgatattgcttttaatatcaagggggagaaaatggcattactcccaatatcgcagggggtgtacaccgctcatgtgatattgttcctaatatccaggtggagagaacataatattactcccaatatcgcacaaggtgtacacccctcctgtgatatggttcctaatatccatgggaggagatgatgatattactcccaatatcacaggggatgtacaccacccttgtgatattgttcctaatatccagggaagaaaacgatgatattattgtgaatattacagggagtgtacacactccctgtgatattgtttttgatatacagggtgggagaggatgatattactcccaatatcacataaggtgtacaccccccgtgatattgttctaaatatttcggtggggagaaaatgatattagtctccatatcacagggggtgtgtgctcctcaggtgatattgtttttaatatcaagagggggaggagattatattactttcattatcacagggggtgtacacccctcctgtgatattgttccttatatccaggcgaggggaaaataatattactctcaatatcgcaggaggtgtacacaccccatgtgatattgttcctaatattaagggggaaagaagataatattactttcaatatcacagggtttgtactcctttcttgtgatatagtttttagtatccagggggaaagagcatgatattactcccattgtagcaaggggtgtacacacctcctgtgatattgttcctaatatccagaagtggtgaggatgatattactcccaatatcgcagggggtatacaccccacctatgatattatttctaatatccatgggaaaagagtatgatattacacccaatgtcgcagagggtgtgtatttttcctgtgatattgtttctaatattcaggcggggagaagatgatattactctcaatatagcagaaattgtacatccccgctgtgatattcttcataataatcagggaaaaagaggatgatattactaccaatattgcaggggggttacacttcccctatggtagtgttcctaatatccaggaagaaagaggatgatattaatcccattatccaggaagtgtacacccaccctgtcatgttgttcctaatatccagcagggaagaggatgatattacaccccccccccgtgatattctccttaatatccaggaggggagaggctgatattactggatatatagcaggggtgttcataccttctgtgatattgttcctaatatccagaaaaggagaggatgatattacttccaatatcgcagaaggtgtacacctccctgtgatattgatcctgacattcagaaggggagaggatgatattactcaaaataccgcagggcatgtgcattcccttgtgatattgttcctaatacccagaagggaacaggataatattactttcaatatcgcagggagtgcacacccccctttggtatggttcttaatatccagaaggaaagagggtgctattactttccatattgcaaggggtgtacaccccactgtggtatggttcataatatccaggcagggagagggtgctattactccccacagtgcggggcatgtacaccctgctgcggtacggttcctaatatccagggggagagaggatgctatgactccctatatcgcggggtgtgtacacccctgtgtggtatgttttgtattctccaggaacggagagggtgttgttacccctcatatcgctggaaatgtacactcccctgtggtatggttcgtaatatccaggggattgagggtactgttacccccatactccccatatcgtggggggagtgcacctccctgtggtatggttcgaaatatccagggtaagagagggtgctattattccccattttgcaggaggcgtacacccccctatggtatggttcgtaatatccggggtgaggggatgctatcaaaagaagagagaaagagaccccccatattgttctatattattttatactcagtacctgttttaagaagaaacaaggaagtgaaaccaaaagcaggcagcccggcgccaggcaccagacccaaaaccagacccgaaaccaggcctgggcctgcctgaccttagcctgatagttaaaattcaacccatgacctagcaaccaatgttatccatagattccagacattgtatggaaggacattgtgaaatttcttgttctgtgctgtttcactctgattaccggtgcctgcagcccctgtcacatacccactagattgctcaatcaatcatggccctttcatgtaagatctttagtgttgtgagcccttaaaaaggacagaaattgtgcactcaacaagctcggattttgagacgctagtctttcgatgcttccagctgattaaaagccacttccttcactacctcggtgtctgtggggttttgtccgcgactcctcctgctacactatgactccccatatcaaggggggtgtacacccccctgtggttcgtaatatccagcaggggaaaaggtgctattactccccatattgcagggagtgtacacccccttgtagtatggatcgtaaaatcaaggggggagggaaggtgtaattatccccatatctcagggggtgtacacccctttgtggtaaagtttgtaatatccagggatattacagggatattatccccaaattaatacttttataatttcttatgcctgcctttactgcaatctctgaacataaattgtgaagatttcatggacatttatcacttccccaatcaatacttttataatttcctatgcctgtctttactttaatctcttaatctcatcatctttgtgagctgaggatgtatgtcgcctcaggaccctgtgatgattgcattaactccacaaattgtttataaaacatgtgtatttgaacaatatgaaatctgggcaccctgaaaaagaacaggataagagcgatgttcagcgaacaagggagataagcataaggtctgactgcctgtggggctgggcagaacagagtcacatttttcttattgcagaaaatgagtaggagaaatatcactgggaagggaacgcattcctaggggaggcctatggacggccgctctgggggtgtatcccttatgtggttgaagataagggatgaaatacaccctggtcccctgcagtgccctcaggcttgctaggattagaaattccagcctggcgaattctagtcagaccagttctctgctcttgaaccccgtttcctgttaagatgtttatcaatgacaatgcgtgcacagcaggacatggaacctcaatagtaattccattttctccctggccttgtgaccttgctaggcccttctgcccttgtgatcttttattgccatttgaagcatgtgatctctgtgacccactccctattcgtatccccctccccttttgaagtccctaataaaaacttgctggttttgcagatcaggtggtcatcacagaacctgccgatatgtgatgtcaccccggaggctcagctgtaaaatttctctttcgtactctttcactttatttctcagaccaggtgacacttaaggaaaatagaaaagaacctactttgaaatattgggggctagttcccccaatagacattgttcctaatatccagaaaaaaagaagatgatattactcccaatatcacaggggttgtgaaccccacctgtgatatggttcctaatatccaggaagggagagaatgatattactctccatattgcagggggtgtgcacatccctgtgatattgttcctaatatccaggggaggagagggtgatattactcccaatattgcaagggttgtaaactccaccctgtaatattgctcctaatatttaggatttagggggggagaggataatattactcccaatatcgcaggggatgtatatgccctctttgatattgttcctaatatccagggggggagaggataatattactttccatatcacaaagagtgttcacccccctgtgatattgttcctaatatccaaaaaggaagaggatgatatcaatcccaatatcacaggaagtgtacaccccccccttttatattgtttctaatatccaggggaaatgagggtgatatttctctcaatatagcagaatgggtacactccccctgggatattattcctaatatccaggggaaaaaaagaggttgatattcttcccagtatagcagggaatgaatacaccctttgtgatattgcttctaatatcaaggggaaaagaggatgatatgactcccaatatcacaggggatgtaaacctgtggcgttgttgctaatatcaaggagggaagagtatgatattactcctaatgtcgccgaaggtgcacactttccctgtgatattgttcctaatatccaaaagggaagagaatgatattacccccagtattgcagggtgtacaccacccctgtgatattgctcctaatacccaggaaaaaagagaatgctattacccccaatatctaaggggacgtataccttccctgtgatattgtttctaatatccaagtggggagaggatggttttactctcaatattgcagggagtgtacactccccctgtgatactgtttctaatactcgggctgggagaaatagtattactcccaatatcgcagtgatattgtttccctgtgatattgtttctaatatctagtgggggagataattatattactaccccatacacaggggagggtgtacattcccctgtgatattgtttgtaatatccagggaaggagaggatgttactcccaatatcacaggggttgtacaccccttttttgatattgttcctaatatctggggggcagagaattatattactgtcaatatcacagagtgtgtacaccccctctgttatattactctttatattcagggcggtagaggatgatattactccctatatcacagggggtgttcacccctcctgtgatattgtttataatatctaaggggaaagaggatgatatcactctcaatatcaaaggaaatgtacacctttcctgtgatattgtttttattatataggggggcagaggatgatattaagaacaataccacaggggatgtacacccacgtattgatattgtccctaatatgtatggggaaagaggacagtgtaactcccgatatcgcagagtgtgtacacccccttgtgatattgtttctgatatacacggggagaaaagataatatttcttccaaaattgcagggggtgtacaaccccctgtgatattgtttttaatatccagtgggggagagaatattactcccaatattgcagggcgtgtacacaacccctgtgatattgttcctaatatccagagtaggggaggatgacattactttcaatatcgcaaggggtgtacattcccctgtgatattgctcctaatatccatgaggggagaggatgatattattcctaatatggcaggggctgtacaccttccctgtgatattgtttctaacatccagtgggggagaaaatgatattactccctatatcacagaaggtgtacactttccctgtgatattgttcctaatatccagaaggggagaggataatattactcccaatatcgcaggaagcttacaactcccctgtgatattgtttctaatatccagggaggtagggatgatattactcccaatatcgcaggggatgtacactcccccgtgacattgtttctaataaccagggggtgagaggatgatattacgcttaataccgaagggggtgtacacacccttgtgatattgtgcctaatagccagggggaagaaaattatattaattttaatatttatggggaaaaaggatgatattactcccaatatcacaggggctgtacaccgaccttttgatattgtttttaatatccagaagagaagaggataatattgctcccaatatcagaaaaggtgtaaaccccttctgtgatattggtcctaatatccagggagggagagaataatattactaccaatatcacagaaggtgcccacccccaaggtgatattgctcctaatatccaaagataatagggtgatgttactcccaatatcacaggaggtgttcacaccccttgtgatattgtttctaacgtacagggaagggagaggatgatattattcccaatatcacaggaggtgtatactcctctgtgatattgattttaatattcggggggaaaggatgatattactccctatatcgcagagggtgtacaccctctgtaatattgatcctaatatccagggcgggataggatgatattactcccaatatcgcagaaagtctacacaacccccagtaatattgtttttactatccagggggaagaggatgacattactcccaatttcacagagtgtgtacactcaccatttgatattgtttctaatatctagggggagagaatatattactcccaatatcacaggaattgtacaccacctctgtgacattcttgtgaatatccggggaaaaagagaataatattactcccaatattgcagagcgtgtacacccctccatgatatcgatactaatatttttttaaagaggatgatattactcccattgtcacaggatgtgtacaccccccttgtgaaattgttcataatattctggggggagagcataatattactccccatatcgaaaaaggtgtccaccctccttataatatggttcctaatatccaggatattacttaatccaggatacttgtaataccctaaatatacaattgcttgaacctccacctcccaggttcaagcaattcttctgcctcagcctcccgagtagctgggactacaggggcacaccaccacacccagctaatttttttttcttgtatttttagtagagatggggttttgccatattggccaggctggtctcaaactcctgaccttgtgatctgcccacctcagcctcccaaagtgctgggattataggcgtgacccaccgtgccaagccaggaagaggatgctctatagatttccccaataagagatggctttgcagggccattccaaaatatgtcaaagaaatacatttggggataaaatactttgatttcctttagggaatgttatctattatgtgatgctataccagagtcaggttggagtcggttatcttattgcaacaaagagtctgttccgtcactgttgggatctctattttttcctcttatttcttgagacagggtctcactctgtcacccagtctggagtgcagtggtgcgatcttcattcactgaaacctctgcctcctgtgttcaggtgattctcgtgcctcagccccttaagtaactaggattacaggtgtgcgccaccacacccagctaatttttgtattttcagtagagatggtattttgccctgttggccaggctggtcttgaactcctggcctcgtgtcatctgcccacctcgacctcccaaagtgctgggactgcaaatgtgagctattgtgcccagccaggatctctgttttaatgttagtgctggtcactttgcatgaactccaaagggaagaaatataatgaggtgtgtctgaccccctgccttctcatcgtgacctgaattagtttttcaggtttgcaggggatacccttggacaagaaggggctctattcggttggttggggggattagaattttactttttgtttacaatatttctcctgaaagagttaggggctcacaaggaatttccgcgtgagcaacttatgaggaaagccatctgggaagatatgtgtccttgtgtcactgggatattctcgtttaccccaatgatacggcaatgacgcagggttgtgaaattacagctatgtgtttggggaaaaaagaaagcaggattgtgtgactacgtttccaaacttcacttgcccttagccatagtgagttgggggcctggagattctgttttctttcacaatgatatagatacaattaaatgtatagaaagcaaaaaaataaaaaggtgagtaatgaggaacctctgattcctgagtggccatgtagttacccatggcacagagccacagttactgaaggtaaagtttgctggggaatttagaaatgaatccagctcttggaggagtcagtttactggatgcctaagaaaatgcaaacaaaataagaaaaaagggtaatattcaatcccatagttattgttacctgtcatagctaaagtaaaattaaaacagagtgctggcttcaatcttgatgctacactaagcttagatttcagtgaatgtgagtctcagccactagctcagagccacctcccaaagaccaaatcatgtagggacaatagaaagtacttctgagaattgtggttaccaagaacctagtaactgttggggaggagcaaaacaaagtacagaaaccagagggtacaatctgagtgagactgctatcagcttctggaggagcctttactaaaatgaatgatgagagtaactggatgatgagagtaactaatggatgatgagagtaagcaatgtctttggttttcttttttttttttttttttttttagcagacgtctcactcttgtcgcccaggctggagtgtaatggcatgatctcgcctcactgcaacctccacctcctgggttcaagcaattctcctgtctcagcctcccgagtagctgggactacaggcactcatcaccacacctggctaatttttgtatttttagtattttctggtgagggtccaggtttccggaaacaactcagagacatatgttaagatgttatctttagttttcacagggaaccaaatatgttacgactccaatttccttggctattgttttaagttaccattaccttctcgttgatcaagttgctcatttacttctcaagcctagctagatgcctggaatttcccttgaaggaagtcaagattttcctttatctccatactggctgatggtgatcgagtaagcccctaagaggggtccctgctccatctcgagatgctgctagattctacagtgcctaataaacagctctcgcctggccgacaaagagctgcttgctctctggatagcaattccaaagtgaacagacaacatcctgtttggaagactgccactctgttagaagaagcatcaggaaaacctttcttttgagctatttataactaacagcaattgaccaagtatacttttgtgagtgaaactgacctttctccctgtaagaattctccaaaatttggaaactatttgtgagtatttttacttatggcaatataattattggcacaagctcaatcagattcggttttctttcgtaacaggaaccattggagatactcattactctttgaaggcttacagtggaatgaattcaaatacgacttatttgaggaattgaagttgactttatggagctgataagaatcttcttggagaaaaaaagactgggtatattttcaatatgctttccttttaaggtccctcacctgtggaaagtaaagaatgtcactttctgacaggctcaggaacctcaagttatgtagggatctcaagaagatgggggaattcacccagttcatacaggtgaaattgctgttgcaaagattatgaatatgagagaagtccagcatggctgacttcatctcgtgtctggcctcaggctggctgcccttgctcactcttgggcataggccaagctagccatgggaggaatttagtttatagtttaactttgaagcacggatgataatagtctctccctaaaatgaaccccttccttgctcagggactgaaactacctttgtatgacaaatgaaagcccacaagattaagattatgagaggggcctgaattctgctaaaatgcaggtgtagctgactgataacaagtcattgtcccacagcttgcctttctataatctcttgcttctcaggagtcacatggccagaggtcctgagatttccagtcctgtgacccccacccagagatggacttagtgcatgaggaccattttccacacccctatgatttcatcctcaaacaatcagcagcaaccattccctagccccctgccttccaaattatccataaaaatcctagcctctgagttattagggagattgattaataatcccagtcctaccccttgggttgctctgatttaattaaaccttctctactgcaataccacggactcagtaaattggttttgtctgtgcaatgggcaagaagaacatgttgcatggttatacaggtactacaagcacagtctgatggcaaattattggttttgcttcctgcccttgatgtttctaaacatctagtccaaaattacttgtgaaaggtccagcaaagccaattttaaaagaggctatatggccaatcactattctttctacacattattgcaaataatcaggccacggctgggcacggtggctcatgcctgcaatcccagcactttgggaggctgaggcaggatcacctgaaatcaggagttcaagaccagcctaggcaacatgataaaaccctgtctctactaaaaatacaaaattagccaggcatggtggcatgcacctgtaatcccagctacttgggagactgagggaggagaatcacttgaacctgggaggcagagattgcagtgagctgagatcacaccactgcactccagcctgggcaatagagtgagactttgtctcaaataataataataataatcagaccaagtataatgaaattaaaatttattttgcaaataaattggtcctactacaatttatccttcatagaaatgtggaaactgaagataaaaaaaattaggtttcagaagaaaactatactacacctgttattagattctagccctaaacattgtttttgaggtttttattatttacctgcaatttggtctaaattctgaattatttcctgactacaagtatccaaggaataaatgggttttctttttctttatgatagttttagttggcttctaatgcaacaacaatttttattgtaatcctgtgtgcattctattcctactattcaaattattaatgttatagatctttcattgtagtacttctgaattaaccaaaatcacagtattctgaagatgattctacaaagcctgctgtttctacaaaggctgctgatgatttctacaaagcctgctgtagtgttgctgtggcctctgcttaaaaaagtagaaaacacattgatgcagcatgttcaccccaacctccctgcctaaaggctcagggaccatcttggaagaggaaggcgcgtgagattgtaagagccgaattagggggatggagtgtggagaataaggacacttcatcttggatgctcacctgccaaattgacttctgatgaaagccagctccagaaatgtgcctacagttactactttcacctaaaccctgcccttagtcaaatccttctcttcttctaagcaatcaacttcaattccttgtataacccacagtataaaagggcttttataccattctatcctattgcatgtaagccttgggtctgggaggtaacagtgtgggattccaccatctcatctccctgccacccaaacatgcctgctcttctttaagcaatattaaatgtttgtacttcagaaatttgatttgtcagcctcttcttcagactctcagcttctttggcctttgggagtaaatttgcataggcctgctcaaaacaggatgttctgggggtttgggggtgttgttttgttttgttttttgttttgtttagagacagggtctcactctgtcacccaggttggagtgcagtggtgcaatcatggcacactgcagcctcaaactcctaggctcaagcaatccccccaccttggcctcccaaagttctgggattacaagcataagccaccatgcccagccctggacttttctttaaagacatttacacagtgtaggaattactgtgggtgcactgctcaggtccccttctccaggatgctcattcctacctcatagatgattttcctgcagagatttgacctcagctgaagggcagtcacctggtccaggtggttgctattcacctccttcctgagaacagccaacagccagggacacgctagcacagagatataagagcgaccaaggtgaggccccttctgtgctgcggtgcatgctccagagcctccctgggatcagacttaagagggtctccagccagatctggtcttcgctgctttcctcgagctccccagcgcactcctgcaatgcatcttttttttttttttttttttttttgagacggagtttcactcttgttgcccaggctggaatgcaatggcgcaatctcagctcaccacaacctctgcctcgcgggttcaagtgattctccttcctcagcctcccaagtacctgggattacaggcatgcaccaccacgcccagctaattttgtatttttagtagaaacgggtttctccatgttggtcaggctggtttcgaactcctgacctcagttgatcctcctgcctcagccttccaaagtgctgggattacaggtgtgagccactgtgcctggcccaatgcacctcttgaatcacctcctcatgctttgcttttagagaacatgatccccaacatgtgattccagcaaagattctagaaagccaaccgtgacaatcacttctgggtttagatgacccccccccaccacaagatggcagtgagcacctcatcacagaggtgctgatggtctgcagcaccgcgccaggccagaacgtgccttttacagaagaaaataacccagtagctgactaggatggtgaggagggctggtgagcactgcggtagtgagagggacactagcatcactgagatgcaagtgatggtcatttttcataggtcaaagctcaaagcaggggacagttacagggcagggcttcatagcaccagtgtgatgaaagtatctgggagtggctaaggccagcactatgccatgggaagcaaggtgggcctgaggaggaggcagcagcgtcagcctgcaacaagtgggggctgccctgcagagacctaagagtcatgttatagagcacagtgtctgtaaggccaagaagtgtggacagccaagtgtgtcaattactagacatactcaagaggagcaggaagggcagggcatggtggctcatgcctgtaatcccagctacttgggagactgaggaaggagaatcgcttgaacccgggaggtgaaaattgcaatgagccgagatttcgccactgcactccagcctgtgtgatgggagcgggactccatctcaaaacaaaaaaagaaaaaggaaaaagaaaaaaagaaaaacctaggtatacttctcaagcaaataaaaataatcaaaaccaatatcatgcccgggcacaaatttcatatatataacagatttaaatatatgagggtgattatcctctcatatctccatttttttttgtttttccatttttttctttactaaaaaaagttaatgccaatgacacacaatttttttttttttttttttttttgagatggagtctcacttcttcgccctggctggagtgcaatggcgtgatctcgactcactgcaaagtctgcctcctgggttcaagcaattctcctgcctcagcctcccaagtagctgggaccacaggagtgagccaccacacccagctaatttttgtatttttaatagagacggggtttcaccatattggccaggctggtctcaaactcctgatctcaaataatctgcccgcctcggcctcccaagattctgggattataggcgttgagccactgcgccccgcctatgtatgattttttttttaattttattttcataagtttttggggaacaggtggtattttgttacatgagtaatttctttagttgtgatttgtgagattttggttcacccatcaactgagaagtatacactgaacccaatttgtggtcttttatccctcacccccttcccaccctttcccccggagtccctgaagtccattgtatcattcttatgcctttgcatcttcatagcttagctcttgaacccttactttctgtttgagggagaagacatatcatctacaagtagatactgtgtaaacattccattgcatgactatcccataacttatttattatttgtgtttggttatttgctgctatgtaacaaccccactcccaactaaatggtgtgacaattccatgattctgtggatcaaaaattctgaaaagtcaaacccaaggagttttgtctctgctccatgatgctaaagcctccgcaggggtgaggcgaatggctcagggtgactgaaaagctcagggttggaacagctggggatgaggcctctatgtataagatgattcttcactcacaggtctgaaactatggtggggacagccagaaggctcggctcagctgggacagtcacctgagccctacacatgacctctccaacatggtgatcctgaagcagttgggtttcttacacagcatcacacttttcttttttttttttttttttgagatgaaatattgctctatcacccaggctggagtgcagtggcacgatctcagctcactgcagcctccgcctaccaggttcaagcgattctcctgctccagcctcccaagttgctgggattgcaggcgcctgccaccaagcccagctaatttttgtatttttagtagagacggggtttcaccttgttggccaggctagtcttgacctcttgacctcaggcgatccgcctgcctcggcctcccaaagtgctgggattacaggcatgagccaccgcgcccggccaaagctcacacttcttatgattcagccttagatgtcacatcagttcattttccccacacttattagtgttagaagtcacaagcccacccatactcaggggactggcacacagaccccactctcaatggaaggggtgggacaccaccattcctgctgatgggcatttgggtaacttcctgtttgaagctattaagattgggctgctgtggccgggcgcagtggctcacgcctctaatcccagcactttgggaggccgaggcgggcggatcacgaagtcaggagatcgagaccatcctggctaacacggtgaaaccccgtctttactaaaaataccaaaaaaaaaaaaaattagctgggcatggtagcgggcgcctgtagtcccagctactcgggaggctgaggcaggagaacggcgtgaacccgggaggcggagcttgcagtgagccgagattgtgccactgcactccagcctaggcgacagagcaagactccgtctccaaaaaaaaaaaaaaagattgggctgctgtgactattctagtaggtgtctttggtgagcgcctacacgtgtttctctttttctctttagtatatgcccaggaggggaactgctggctcccagataccgtatgttcagggtcacacacacttccacagggttttccaaagcccttgtaccagcacgcactcccagcacctgtgtgactgctccagctgtcccacagtctcatcagttctattgctgatattttcattttagcttaagttatatttaataggaaaattaccgttgcctctgccccccgttcctgcctgtaggagtttctcgtagctgttgctacaggtggccacaaatctgtcacttaaacccacacaaattgatgtccttatggctttggagtcagaagtgtcaactgaaggtactagcagggctgtactgacctggtggcctcagggagcatctgtgctgcttctccaccttctagaggctgctgcatccctcgctccagccccttcctgacaccactcaccctcctacttctgttatcacatcctcaccttctctgtgttcagggctccctctgtctctctcttgcaagcacacttgggattccattgagggccacccacataacccaggagaatttctccacctcaatatccttaacaactgcagagcccttttgccataaaagttaccattcacgggttccagggattgtgacatgggtagctttaggagtgattattcctgcctgtctcccgctcaccagaacttggactttctctctcaacaggagccccctgtgtgggaatagcctgtctcaacgacgccctctataaggacctgcttcctcaaaggacctcatagtcgggtcctgcccctcagtgtccagtctgccttggctggaggggctgcaggggtgtgttggcgccacctggtggagacagggcatcacagcaggtgggagcccagtagaagcacaaccaaaacatgggtaatgtttaaaattttctggctaagcgctgtggctcacgcctgtaattccagcactttgggaggccgaggtgggtggatcacatgaggacgggagtttgagaccagcctggccaacatggtgaaacatcccctctactaaaaaatacagaaaaattagctggacatgtggcgcgctcctgtaatcccagctactcgagaggctgagacacgagaatcgcttcaaccccggaggggttgccgagatcgcgccactgcactccaggctgggcgatagagcgagactctgtctcaaaaaaaaaaaaagaagaggggaggcgaggggaggggaggggaaaagggggaatttgtttggagctgagacatccatcttctcctgacctcagatatttgcactcctggttatgaagccttcacacttggactgaatacaccaccagctttcccgatttccagcgtgcaaatggcagatcgtgagacttctcagcttccataattacatgagccaatttatatatataaattgggtcctccagaaaaacagaataaattatatatataattatacgcataacttaattaaattatacgtataacttagctatatatataatttattctgtttttctgaagaaccctactgacacaaatgttgagcatcttttcatgtgcttattggcttaataacttgtacatcttctttggggaaatgtctattcaagttctttgcccattttgtaactgaactattaatatttgtctttacattgttgagttgtaaaagttccttatatattctagatactagagccttatcagatatatttctgcaactattttctcctaatatataggttgtgtttttattttctttttctttttttttttattgagacagtctcactctgtcacccaggctggagtgcagtggcatgatcttggctcactgcagactcgacctgccaggctcaagcaattctcccacttcagcctcctgagtagctgaggttataggcacttgccatcgcacccagctaatttttgtattttttagtagagccgaggtttcgccatgttgcctaggttggtcttgaactccctgcctcaaagcgatctgtcagcctcagtctccctaagtgctggaagtacaggtgtgagccacagtgcccggccatctattttcaatagtgttttttgatgtacacaggtttggaattttgataatgttcaattcatccatttttttttttttttttttggttctttctactggaccaccactcttgagccctctaatccaacctccacgcggcagccagagggagctctctaaatgtaattactctttccctgctccacctgctcaaaacagtgtcacatttgtgatttaaaacagtatttctcaaacctaatttgcaaacaaagcaggtggaactcttcttgtatgcacagcatctgatttggttggtctggcatgggtctgggagtgagcacacctaccaagcggctgctggggtaacttgcgttttccactgatgatttcagcaatgtttccggtcccacatgctcctccagaaccttgtactcccccatgaaaaggtggagtccatttccccttcctttatttatttttttgagacgaagtttcactcttgttgcccaggctggagcgcaatggcgtgatctcagctcaccgcaacctccgcctcctgggttcaagcaatgcttctacctcagcctcccgagtagctgggattacaggtatgtgccaccacgcccagctaattttgtatttttagtagagacggggtttctccatgtcggccaggctggtctcaaactcccgacctcaggtgatccgcccgcctcagcctcccaaagtgctgggattacaggcgggagccaccgcgcccggctatttccccttcctttgaacctgatcaggacttgacgatggcatcaacatggtgagagtgaccctgcatggcttatgaggctgggttacacaaggcgatgttgcttctgactggctccctctcaggatacatgcccttggaacccatcctctaagctccttgggagcccaacttagcccatgtggagacaagacagggagagaaacagaggcacccccagccctcagccagcatcaaccgccagacaggagagcaaatgcgccaacaatgattccagctgaagcctcagacagcgtggagcagagatgagggatccctgcagattgcagatgcgtgagcaaaatgcatgctgtcactgttttgaaacaacaatgtctgggggctgtttgttatgcagcaatagacagctgtaacaatgctgttactgctgtattccatgaatgactgcactttgagtagcagggggctagatcactagataagccccatggcttctgtgtatgctatttttctacttttatatccttttcattcactttttttttttttttttttgagacagagtctcactctgttgcccaggtgggagtgcagtggtgcaatcttggcggactgcaacctccacttcccgggttcaagcaattattgtgcctcagcctcctgagtagctgcgactatagatgcacccccatgcctggctagtttccgtatttttagtagagacggggttttgccatgttggccaggctgatctcagactcctgacctcaggtgatccacccaccttggcctcccaaagtgctgggattacaggcgtgaaccactgcacccagcctcattcactttctttacttggctcatttttccttgttgcctcaattctcctctaagatcactttcctgacatttcagcctgggcctgttgccttctctgggtcccctccgcctcctgtgcctcccccatctcagccttgatccctcagattatacttcctctgtccccaccctgaccatcttggctgtccctggatagggatgggtatcttctcccactggtctgggagatctggaaggacaggcctggaaaagacttggtcactgctggaaggagctcagttagtgtggtgctgaggacagtacgggtgaggctggccccttcacccaaactcccactctcttccatagatttcacctctgtggcccaggccataggattagggcaactccccttaaacatcgagtccatcctccaagctgtccttttttttttttttttttttttttttgagacagagtctcgctctgttgcccaggctggagtgcagtggcgcgatctcggctcactgcaagctccacctccagggttcactccattctcctgcctcagcctcccgagtagctgggactacaggagcctgccaccacacccggctaattttttgtatttttagttgagacggggtttcaccgtgttagtcaggatggtctcgatctcctgacctcgtgatccgcccgcctcggcctcccaaagtgctgggattacaggcgtgagccatcgcgcccggcctcatgctgttcttgaatagtgagcacctgttacaagtcgccccaccagcctctcacttgtacccccctcatctctttctccccaagagacagaggaccctggcacttgtgaagcatgacccagaccctggggccatggcatccaacatcctcattccccatgacccctactgtctagatgtagctgccaagagacccccagactccccgggcctctgtctagagtgccaagacagagagagaatgccctgccgcttgcatgctttgtggggtgtccttcccccttccctggctgctaggcgtgacttcaacgttctccccaacccccaaacagcagcactgacaccagctgcagacctggctcaggttagctaatgaggaccaggctggggatggagcctgaacccctaaaccccagtcctgtaccccaccctaatcctggggtctccactggacaaaacgaagcagcttggtttttcgttgttattgtttttgagatagagtatctctctgtctcccaggttggagtgcagtggcgtgatctcagctcactgcagcctccgcctcccgggttcaagtgattcttgtgccgcagcctccccagtagctgggattacaggcgcgtgccaccacacccagctaatttttgtatttttagtagagacagggtttcaccatgttggccaggctggtctgaaactcctgacctcaagtgatttcccagcctcggcctcccaaagtggaagcggcttatttttaaggagaaaactcccgtggaaaggaatcagcacctcctctgtcaacatttcacttctctgaaaagactctcacttccaacagaaagtgctttgtaacacaacaatgaggctgggcgaggtggctcatgcctgtaatcccagcactttgggaagctgaggcgagtggatcacgaggtcagaagttcgagaccagcctgaccaatatggtgaaaccccgtctctactaaaaatacaaaaattagttccgtgtggtggcgtgagcctgtaatcccagctactcaggaggctgaggcaggagaatggcttgaacccaggagatggaggttgcaatgagccgagatcacgccactgcactccagcctgggcaacagagtgagactccgtctcaaaaaaaaaaaaaaaagaatgagaacatatggacacagggaggggaacaatacacacaaacaaaatttagaaacaggtgaaaataattttagtaatatttttactaatactgatatgctcaaaatattattatttcaataagtaatctaaaaattattgagatgtcttatgttcttttcatcatactaagcctttaatatttggtgtgtattttacactcacagcacatctcaatttgcagtccccatgtttcaagcactaaataaccatgtgtgtccggtggctaccatactggacagcgttgatctgaaatcgcatctgtatgcatcaccagcatatttgcagagatccccatctcagcagcacacctgaggctcatctgcgaaagcacctgcaacttctctacaacctcccacatcacctccaaacacatcctcatgtcatctgcaaacacacccatagctcacaggccaatgcctaaatatcattgcaggcaccttcagagaaagcacttactaaaggggtatacttgattccacatctgctttgacctgcaaatctcccttctcctttacatacatttgcatctcatttgtatgtcaatctaaatccactggcagagcctcagatcatcatctcaaagtcaggtggatgtggggctgggcaggcctccaggtgttcctcctcctgcttcctctggggctcttgatcctcctcctcttccttgctgctctcctcctcctcctccaatatggtgaccagttcctcccgcagcgcccccatctccagccccaggctgcacagctgtcccagcagctggacatccactcggcgcaggttcccctgccagtaggaaggggacgtcacagggatgccaccccagagagcaaggggtctctccaggacctgggtgagagcaggtcccaactcatgtcctggccacagcgcctgggcagggtcctcactgtgcccatggaccctaactgccttcctgcttctcagagtgtctcttgatctctaactcttctctttgtctctccatttcattgtccctgacttctctctctctgtctcctccctctcttatctatatctgtccctgtttccctttgtctctgtccccatttattttttgtctttccatgcccctgtctctctgtctttatgtgttgccatttctctgcccctgcctttggctctctttctctcgcttgccctctctctgccctccccaactttctcaaattcagtctgtctctccatctctgttcctgctctccgtctctgcttcccacctctgtccctctcttttgggatctccctgtccccacctctgttcccgtccctcactctatgtctgtctctcggtgtctgtacatgcctctcatgtctctgcttctatctctcagattctgtttttcgatctctggccttctctatttttgttcatttccattcattctcatttcctctctttctctttcccttccaaacccctcactcaccagctcctccctgatccacagcagactatcgcaggcacctccagtgtctgcccctgcagtcctgagggtctgaccagggatttccactggggagacctccctcagggcctgggggggtgggcccagccccggaggcaccagtccagcctgattcagctgcctccacagttccatcgtctctgagctatggctgcaaggagcaggaagtagcaaggtccagggtggcctggtcccctggggagctgtgtgcgtggtggagagtaaagggcagagggagtgggatgggggttcctgggaaaggtatcccaaagtccactcttcagagagaatcagctggccttgtgcttttctttttccttctgaagtctaacctcaactctgctcacagggttcaaacatagcctcttgcagaggtctaactccacccttccctgcctgtctcaggcctgacccctcaggggcgctcagtgtctgtagatgcctggcaccctctgtccttccacctgccccccaccaccacttctccagcctctcctcagcctccatttgacctctggcttgcccatagcttggtccttgcttgtcctcttggcacgggtcatcctagggctttcccaccagtgtgcctttgggggcaggaatggctcccaggggcaccaagacagcaatcccttagctggagtgcctgtgtccaggctgctggcctagggccaagcagccaattctgctgaccctggacttgcctatgggtatattatccctgttgagggtgagggcttctgctgtggaaaagtctgggaagcactgcaggcctctctcggccttggacccttccttcagacccaaggtgcatatatatacatatatataatggtagatcacgaggtcaggagatcaagaccatcctggccacatggtgaaaccccgtctctagtaaaacacaaaaaattagccgggcatgctgccgcgtgcctgtagtcccagctactcgggaggctgaggcaggagaatggtgtgaacccaggaggtggaggttgcagtaagccaagatcacgccactgcattccagcctggcgacagagcaagactccatcttaaaataaacaaatgaacaatatatatatatatgtattttgttttttgagacagagtctcgctctgtcatccaggctggactgcagtggtgcaatcttggctcactgcaacctccgcctcccgggttcaagcgattcccctgcctcagcctcctgaacagctggggttacaggtgcacgccaccacacctggcgaatttttgtatgtttagtggagacggggtttcaccatgttagccaggctggtctcaaacccctgacctcaggtgatctgcccacctcggcctcccaaagtgctgggattacaggcgtgagccaacgcgcccagccccaagtcccttttaccatagaaagtaacatagtcacagtgcccagggattcacaggtatggggagagggttcgttattcagctgccacacccaccttcctaaacctgctgcccttccagtttcctcacgtgcacagccacgcccgtctgcttttagtttctcaatctgttggcttaaccttcaaaacaggcccaggatttgagcacttctcaccattccctctgccccatccccattcatctcttgcctagactgctacagcagcctcttttactggtcccctgcatccacccttgccctctaaggcaagggtccccagtccctgggccaaggaccagtaccagcccctcgcctgctaggaactgggccgcacagcaagagatgagcagcgggtaagtgagcattaccgcctgagctccgcctcctgtcacatcagcagtggcattagattctcataggaggcaaaccctattgtgaactgtgcgtgcgggggatctaggttgcctgctccttatgagaatctaatgcctgatgatctcaggtggaacagtttcatcccaaaaccatccccaccccacccccgacccccagtctatggaaaaattgtcctccacgaaaccagtccctggtaacaaaacggttagggaccgctgctctaaggtacattctccacctggcagaaataatctttacaaaatgtaaatccgattttgacactcccttcttcccactgtgaatagaataaaaccctaccaggcctgcaccgtcagcccctgcccacctctcaacccagtctcctatctctgtctgcaagctggttcccacctcaaggcctctctgctctagaggctacctctccctgcagcgcttttcccctagatctttgaatggctctttccttatcattcacttctacttcaatgtcacctcttcagagaggcctttgctgatggccctacacccagtcacttttttttatctgcttctcatcaaaattgccttgctgattcctttgtttcttattcatcctctcccacatccatcctctcccagcccagaatgttgacttcctgagagagggactgggtctgtcctgctcaccatggtaacctcggcatctagaacagtgcctgccatcacgtggtaggtgctcagtaaatattcttggaactaatgaatgaataattctatccacaagacttcacaatggctcttcatgctgcgatctagctttcaactccaaactggtcttgagatctcacctcagtctctaaccttgacatctaacctcttcacccactctcttacctgaccctaatttttaaaaatgacgtggtcagcttttcagccccctcattccctgtttttaggaggtagtgagtggaagctggaagaataagaaagcttggggagactgcaattgcagtcaggaaagaaaggtactctgccgggaagaacaccccatcttctcctagggaaagattgtggagtcctggggtttgttttgtttttcaattttttgttttaagagacagcgtctcgctctgtcacccaggctggagtgcagtggcgcaatcacagctcactgcaacttcgacctccccggctcaagtgatccccccgcctcagcctcgtgagtagctgggaccacaggcgtgcaccaccacgcccggctaacattttattttttgtggatataaggttgccctatttctttgtggagataaaggctcccctatgttgcccaggctggtctcgaactcctggcttcaagcgatgctttcgcctcggcctccacaaagtgctgggttcacaggtgcgtgagcccgacctgtgtctcgttttgaagctcagggagagggcgctgtgagcaatccctaaaccctttaagagtaaaaagtgcgtgcacctttaagaggacggttagaaaacgcggggcgtggccacaggagaataagttcgcgctgaaccaggagcgtgggataagaccggccccttccggttacgaaaccttagcaagatggcggctccctgggcgtccctgcgcctggtcgcccccatgtggaatgggcgtatcaggggcatccatcgcctgggtgcggcagtggccccagagggcaatcagaagaagaaaaggacaatactccagttcctgaccaactatttctacgatgtggaggctctgagggattacttgctccaaagggagatgtacaaggtgcatgagaaaaatcgatcttacacctggctggagaagcaacatggtccatacggcgcaggtgcctttttcatcctgaagcagggaggcgcagtcaagtttcgagacaaggagtggatcaggccagataagtatggccatttctctcaggagttctggaatttctgtgaagtgcctgtcgaagctgtggatgccggtgactgtgacatcaactacgagggcctggataacctccgaacctccgcaggctggacatctcggacctccctgccgtgtccaaccctggcctcactcagatattggtggaggagatgctgcccaattgcgaggttgtgggagtcgactgggctgagggcctgaagtcagggccggaggagcagcctcgggacacagccagccctgtccctgcctagcctttagccctgtccccactcacgtggcttctcagcgggctgcatggaatgtctggtagctcaccacacttctggcttccatttgtcttcactcaacgtcagggtgggggagtggtgctggccaatcacaggagagagcgtgagttcccagtatttattcctggctgcccttggctaaaggtcacagctcctgtcaccctgtcaggcagccctttccatgcccctgttcaggcctggggaggtaaaggctcaggctgttagtagccgcagagagccacactcaccttgtcaggagactcttctcaaactgtccttatgtgagtgcactgccatttcttgcagggaccctgactgacacaggggctactactgacactttacagggatggttctcccccgtgcagggccgctgtgcccactgcaggacatgcagcatccttcgccccactccactcactaaaggccagcgcaccccaggccccatagtattgctggttatggatttattgactttatgttccaaattcagctttttcagttggctgttttttgaaaggggataagctttgtcagtagagggcaccgaacaggcattataggaggaaaggcgcctccttcgtggttcttgttggcctccactgaggcacctctctgggaataacgttccccagcaccccaaatggatttccagtcaattcagaagcattttaccagtgaagccctcattattccagttcactgttaaagccagtaattctctatattaaactttccctgttcggtttatactccggagtataaaccgaacaggcctgccatagaaaatgcaaccacagaaataaaatggattgctttttttccctgtagtgaaaatacatttaaatctatctca

SEQ ID NO: 735314 - DNA, 188239 bp, Homo sapiens
ctccaaggctgagggatgaggagacctgctgaggacccagggccttatctttccatcccactccataggtcccagtattgactgatgctgtcttcacctcctagcctcacttttaaccttctggcacccgcccaccactgtccagttcactattgaagccctgccgtccagtgctgcagagggaaaggatgttcttctactggcctgcaatatttcagaaactattcaagcctattattggcacaaggggaaaacggcagaagggagccctctcattgctggttatataacagacattcaagcaaatatcccaggggccgcatacagtggtcgagagacagtataccccaatggatccctgctgttccaaaacatcaccctggaggacgcaggatcctacaccctacgaaccataaatgccagttacgactctgaccaagcaactggccagctccacgtacaccgtgagtgattcccccatacctctgggtgctggcggtcagttctgcttcacacacatgagattgtcaggcctgggctgtgcctgcatccccctctgcattttgtcccgtgttgagatttgggcatttagtgcaggacacacacatggtaggtaaacttcaacagatcagaattcctttcctgcatccaggccctgcagacactgatggcgggggcgggggggcctcagcagggggaggtcagtctcagccaagcaccccatgccctccccatgaacctgaccctgagaaagaccctggagaactgggtcagggcctggcctgagggcgtcctgggaacctcacaaaagcccagcctcaggactcctgactccgtgtgaccccgggaagcctgtgtcagggctggggtgtggtctcctgggcagggcttactgggagcaaggatttaccagatgtctgcgggctgtggttcctgaagcttctcatcagtgagggctcagctcccagagtctcatctagacaaggacagagcctaccactttccctgggactcagcctggagagggcagggggacaggattactagggcattggccccctgaatgaggagcttaagagatgcccttgggcagtcagtggcccaggggtaggaacagaggggagaaaatgttcctggcagcttcttgtccaccggggatcatgcccaggggtgctctcccatggaggcaaataacagatgctgttgatgtgaacacctcctctgtgccaagcttcatgtcagatcctgtgaataatttaaagttcattcacagacaaagtggcaagcctcagaccattttccatttacatattgtatggaggggaaactgaggcacagagagatacagacaccggccacggtgggcagatcgcagctggcagagtcacatgagggctgtctgcagctgctgccacgtcctctccttcatccctggtgccttactaggtgtctgtggaccttagaacagccactggttcggatgttttcttcttaggtgtctacagctcggagggggagattctggtctggagagttatgagtaaatacagaattaatcagttttttcttaactaaatcacctgcctcaacaatcagtcagtgctggggaagttcaggcctcctcgctcaggtccacaccccgcatctctggacatgaaatggcttcgtgtgttttctgatgtgtgggtatcattccaacaggaggataaaggggaggactttgctttctctccccattcacaccctgcaccagccagggcccagtgtgagacacatactccgtagttctctcatgaaggagggagggaatgaatgaaggaatgatctataacctcttcagagacagagacctggatacaagatcctaggaggttctgggcccaacgtgagacacacactctgtagttctcttatgaaggagggagggattgaatgtaggaatgatctataacctcttcagagacagagatgtggatacaagatcctaggaggttctggccacacctgttttctgtccctctagagcctaagacccatgtctcattcatctggcccgtttctcctaaatctgcccctgggagctgagtctcatctgaccctggggctgcagggctgtgggaaggttttcaggggagggatcaggcttgcgggtagtcccacacgtttgccttacaccctggagctctacctggttctcactatgaatatcccataataatcccccctatcctttctggggagtagaaaaaaagtaaatatttaaaaatatgccagagcatctgttcttcttagcaagttcagatagttattagttagcaggaataaatcgttattttaccagagcctcacctgctgggggtttatgggagcctaactgactgaggggggtgggaaatatccaactccagccccctctagccatcatgtcccacctaaaggagagaaaaaactgagaggcacttgtgacattcacagcccagggcacagactctatccaggaccacagaacccctccctccccccactcaccaccgcatcactgaacgcctgctcacccaagttcctgttgcccagtacatcatgtcctggctttcaacaaaaactacaagacagactagaggcaaaaaaaaaaaaaaaaaaaatgcagttcgaaagacagaacaagcatcagaaccagatgcagatgtggcagggatgtggcagggatgttgaaattatcagaccaggaatttaaaacaactctggggccaggagcggtggctcatgcctgtaatcccagcatttgggaggccgaggcaggcagatcacctgaggtcaggagttcgataccagcctggccaacatggcaaaaccccgtctctactaaaaatacaaaaaattaggcaggcatggtggtgggtgcctgtaatcctagatactcggaaggctgaggcaggagaattgcttgaacctgtgaagcggaggttgcggtgagcctagattgtgccactgcactccagcctgggcaacagagcgagattccatctctaaaacaaacaaacaaaaaacaatactggctaatatgctaaaggctgcaatggaaagcatagacaatgtgcagaacagacggatgctgtgagcagagagatggacaggctaagaaagaataacaacagctactatatctatctatctatctatctatctatctatctatctatctatctatctatatatatgtatatatatgctagagatcaaactcactgtaacacctggatctcagagtggttgtgaggatgtttattaggagattaaagagattaaagcagagttatacacagggcgagagctcaactgatgctatcaactagtattcttatttttttgatgttgttattggcaataaaatcaggaacaatgcagtaaaaatttggttttatcatgtacgagttctgtgaccttccttgacttactgaggtactgtaagtctcagattctaactctgcagatggcggtgatgcccctctccctcaaggtgatgtgaggatgagatgagctgtaggtaggttggtgcccactgtgcctggcacatggaaggcccctgaaaatagtcaatgaacatcatccccgctcatcagcatggagttgacagtgagggctcgctctctgtgacaatcatggaatggaaaagaagaaacaagaggaagactgggcgcagtggctcatgcctgtaatcccagcactttgggaggccgaggcgggcagatcatctgaggtcaggagttcaagaccagcctggacaacatggcgaaatttcatctctactaaaaatataaaaattagcctggcatggtggcacaaacctgtaatcccagctacttgggaggctgaggcaagagaatcgcttgaacttgggagatggaggttgcagtgagccgagattgcgtcagtgcactccagtctgggtgacagagcaagactccatccaaaaaaaaaagaaaaagaaaaaagcaacagagggaagaggtgtgacatgagaggaagaagggatttaaaggtacaggagcagggcgaggtgcaagcacctgtgggagaatgtaggagttggtacatcccagtgtgtcaagtctgagacacagaaaatggtgcaaccgtggagagcaagggagtcagctatgaggacagcccaacagaccacactcaggctctggagcatttccttcctccctgactatgcccctgccctgcaatgccccttatggtttcccttggaacaaacttgggccttgtcccctttgccttcccctttctgcagaaaacaacgtcccaggccttcctgtgggggccgtcgctggcatcgtgactggggtcctggttggggtggctctggtggccgccctggtgtgttttctgcttctctccaggactggaaggtaccgcagcttttccccagcctcctcccacccctaggctgaccccagtcagggaggagggagaccccgccctgtattcagggccaggctttccgcatcctcccaaggaatccttccctctcattccatggctcctcccttgccagctgctgatcctaggctgcctcttcctttatgaatgtggcacagttaaggttgcacccctgagtgctgtcctagttccctaacacagcaaagccacagctgcctggagggaggaagggagggagggagggagggagataagacgggagtgctcagaacctggtaccttctgctgttcattgaatttacccacccagtgaggagggatttgcaggcttgagatccatggtgggggtcctgggcatggtcacgcagtggggagtggcaaagcctggacaggctgggtagggtcagcaccccatcgtgattgatgtccctgaggtgtgagatgggagaacctggacctcaggacctgctgtcctttatgtctcttgccaaggggtggagagagagaggacaaggccattgccccatttcagcatctccaggcctgaaaggagggtctggccatggcagggatactgagttctgggagaatatgatacatgctccttgcctccccatgcccccagctcccccagtgtcctgcacacacagccggccctgctttccctctggggccttgacccttcctctcaggcaaacgcaggtggtctgattccctccctgagtcctcagtccctttcctgggtccctgggtcaatgttctcctcacccggcatctgcctgggggggtccttcctctctggccaggacagacgtgactgcttaaggcctatcctcagctccccgtcctcggccgctcctaccacgaaactgatggagacaggaggccttcactccagtccttgaaaatggagtcccttccttgtcctttattctgcccctaaacctgtgatttctccctgcaccctcatgaataatcctgacctttcctagggccagcatccagcgtgacctcagggagcagccgcccccagcctccacccctggtgagtgtcccttcagcccaggtgtgggagcccctaggcctgccctacggtgtccactcctgccagtcaccccctgggggcctctgaccctttctttggggctgcaaggaggatgtcaggaaacatgacacaggggaccccgactgtcttgttcagactgatctgtgggctctgggtcgtgggtcacctcctcgacctcagctgctcaggtctcccctgggaagaggctccctctccctgattctctgggagctgaggacccctacactctcctgcaggaggggcccaggctctcctcccaccctgctgctcactcctgtctctgtccccaggccatggtccctctcacagatccaccttctcggtaagcctgttccctccccagcccttttctactggggtcccaacagtgcaggctcagggcagggggaccatcaaccccacagcacagcactgacccacctttccccagaacagtcaggtcaaagtgagtgcctccagccaggatccgggcctctctacagggccaggaccacccacgccatgtgctgacccctccccgggaccctctacacctgaggagaaccctggagtccagcaggtgcagaatggacactgggaccatcagtcagaggcccacattaacaagggtgcggggtgggcccagccaggacaggggtcagggtgttgtgtccacactgggaggctgagctcaggggcagagctggtcaatcctgaggggaaatgagtggaagtggaggcagggaagtaagtcctggccgatcagagacaggaaccttccaggctgggcttccgtgaccctccctccctgtcccctgacatctcctctctcccctgcccaggcccctctacccagccccagaacagccactcccatctatgaggtgagtgtgggccatggatgttctggtcccgcaggctccaggggacccaggatctgcccccaccagcacctggctgagctcagattcaggaaaatgcagtgaaaatgagaacaggtggtggtgagcagaggagggaggggcctgggaacagggaccccctgagcacagccaggttcagccccagagaagccctgggtgggcccagagcctgggagatgccagacactgttctgagaaggctacaggggttgaggcctcttctctgtttttacaggaattgctatactctgatgcaaacatttactgccagatcgaccacaaagcagatgtggtctcttaggttcctctgggagctgctcttgtgggttgatggagcgtccccaaagctcccagccctggggacggggaaggacatggagcctgagccagagaaccagctctgagtcctgaggagacacaggcctggggacagggagggatgggagtccctgctgaatatctggagaccctgacaggttgccctgggctctgggtgggccgggacaaaggcctctcatcaccacaggaagcgggggcttgcaaggaaagtgaatgggcctgtggcccacccggggtcaccaggaaaggatctgaataaagaggacccttcctctcattggctctttttctgctcacgggaacttagcagaaactcacctgaaactccgtgtccattctctcccgggtcacacagggaaaatatctccaccttgtctcaaccacagtctctcttccctgggaggcagaaataggggttgggagtcaggctggggtgggccctacacaggaaagggcaagattcacatgagccctgcccagccagccgagcgctcagctgtcctcacactaccccagggaccaaggccatgcacagccccagcctgggtccctctgtgaatgcatgtggggtctcaggagcacagaagatggggccatctgatgtccacaaaaggtgagcaatgcgggagcaaccatgggtggtataggttgcggctgtggcccctacgcagcctccagtgtcctgacccctgctgccctcttcacccaggccctggaggcccagtctatcactgtcctccacaaatgaacttacctgtccccaaatccaggatcctgtgtgcttatacctggccactaggttctcctctgtcccagtggctactgctcaggacatctttatccctggtggggcacagagaggggctgtcagagcaaccaagattaatacagacgcataattcagtccttgagcactacccaggactctggcccctcattgctcatcagttcccactttaccccctggcatggatctcactgagcaagccaactctttacacaggagcatccaggtcagaggtgcaggactcccccatctaaagctcatgcaggctcccatggcgatgggacaacctgtctgctcctctccctggcccacagccctatctcgcctgcagctcctccacacacctgggacagcagttctcagcccttccctgagggcccctggaagggtgatgatctcatataggttcacttgaaccaggtgccaccttcccacaagtgagctggtgcctgcactaaagcacagagccacagttcccaagagtgttctgccactgccacaggtcccaagagtgttctgccactgccacaggttgttcgtcctgagatgagaggtaagaaaacaacccgcaatgggttgttttatatcgggatttgcatcaggatttagctctaaatgacccctgatcccacctgcacacagcgtcagatgagacaaggtgaggcctctttagttttctgttgaggctgtgacaaattaccacaagcttagtgacatagaaacctgaaccaaagtgcccacatggctgtgttctttctagaggctccagggaagagtgcatttcctctccttttccacctcctagaggcctcctgcaaccttggctgtgtcctctttctccatcttcaaagccagcagcacagcatcttgaaactattctgtgccctgcttccatccccacatctccacctcctcccacctccctctctcacttaaaaggaaggagccttgtggttattttggacgcacctgggataaaccacaacaacctccccatctcatgatccttcctttaatctgtaaagtgtcctttaccacgtgacatgtccacagatctggggatgaggatgtacacatctttgagaggcccttgttctgtccatcactcctctcaaggccatcttctcatcatcgttcactacaaactacacatgggcacctggatgggttcatcatgactgtggcgtcagttcctgcattaacatccccagcaccctccagatcctgagagagggagacggagggctctccatgcccctagtacctctccaccttcttcttggtgacatgcttagttgctaagaataacagaaagcggaggtgactgaaagatcacaactcaccggcccttcaatagttcgtggacatcagcaccacggacagtgactcagtgaggctaatttccaggtggcagcagggagcatgcagataggagggaactgcaggaaaagctgcccattctattctatatgagaaagagtgtaagaaagaggaagctattacagggataatgctattcttctctaatccataaattgcgaaacctttgcatgtctggatatcatggtttttagcacatctgctgccactccctgcagggctgattgctgcatccaggatgtggtctcttggggggctcacagcctgctttggcctcatggtgagtctccctgcccctgacactcaggccactgtctctgcctacaacatggtgggaaccttccatgattaacgtctgattctctgtgcctgacctttgaagcacatccatcactcagcctggagcatccgctgagctcagcatcctgctcctccatccccagctgagcccttgaggagatgcttgagaggatctcctgggctcctctgtgagctcctccaggctgagccttgtgcttggtgtcagaggcctttgccatctgcttgttctttccataggcaaataatcctcctcagggacaagtggggcctgaagatctgtctgaatatctatctatctatctatctatctatctatctatctatctatctatcatctatctatatgtatgtatatatgagaatgctttattaggcaaaactgcatactatgaacatgctttaaaatgcaacaggatgagatgtgaagacataaagaacaagtgtgtagtgacacatggctatcagaacacactgaagaatccacaccgcggccgagagcagtggctcacgcctgtagtcccagcacttttggaggctgaggcaggcagatcacttgaggacaggtgttcgagaccagcctgaccaacatggtgaaaccccatctctactaaaaatacaaaaaatttagccgggcctggtggctcatgcctgtagtcctggctgttcgggaggctgaggcaggagaattgcctgaacctgggagacacaagttgcagtgagctgagatcgcaccactgcactccagcctgggagatagagtgaggctccatctaaaaacaaaacaaaacaaaaagaatccacactgcttccccgcttcactttacccagaaaaggaatgttctaggccacttcctcttcagcacacatccccagggaactaaaataggttcacagtcacccccatcttcctcattcccatcacctcttacccacagaggcatctctggtcctacagatccagccctgccttcaagaggcacaggtccaacccatccagtgtccctgctagtcacacacagcactcagggtacaatggagggcttctgtgctttggatgggaacaaaccccacctcacattcccacacctgagaagccaccagggtcctctctgtcctgtcctcacactcaatgtctgtcctgggtcacccttgtcatctctcctggaaataggcatggctcctgacaggtaggattgaggctttgtcttttcaggagtccctcccactctgagcacatgaaactgctcagctccatgcaaccctctctcaccaggggccttgttctctgggtccctgaatacctgggtccatgccatgtacattttaagaaaaatgacagtgactctcaccctgacatcctcacccaaggcacgtgtctgacaagaatcaccaggtgagatacctgtggctccacacacctgaggcttcactgcgcaggggtgtcctcatccctctcctcccacccctagggacagtaagcaccacaggctgccttggaccaccagctccccctcccagacacagcctcagatctatactgacatgctacatggagaggctctgatgaacagcaggtattaggaaatcccaccgaaccaggtgccacttgcggccccactcctcctcatatctgtgactgggacagacacacataacacacctctgttcaccgcccagcccccaaggtcaatcacagtctgcttctcccctagatccactgctccccatgtcttccgtcctcagctgcatcctgggtggcctccttgctgttcttgtaccccagaggcaggttccaacctttgtgatgttgcctgcaatgcccaaactttcccttccccttccccttcccttttcccctcccccttcccctccccttcccctccccacccctatcccttcgtcttcccttgtcttcccttcccttccctataaagccaaacatacccatccacctaccttgtggtcaaagtcatcagcctcctgctccactcagtgttctctgaccctgcatatggaggtggtggcccctcctagaacacccaccactcactgtcagccttgcgtggtaatcacagattttgcaggggttacctgtgttcaggtgtgtcacctgtggaaccagaactcttggaaggactggcagagggagctgcttaggatatctcagggctcctggcatctggtctaccacagggctattaacaacagcacttagggacaaggtggaggatggacggttaagagggtaaatatggatgatgtgtgggcaaagaataggacacaggaacacatgcagtactcaaataattatgccaagaaaggtgaggacatggagatggacattcccatatacttctgatgggactgcagtttagtccctacagcaacattgacctcatcatgtttaacgcgcacacgctctgaccactatcctacttctgaaggcctccctgtgctgtgagctctgagaaggccaagcttgcctgttctgtctctgctaaagccagagaccagccaatagcccagcacagggtacttcataaatacatgttgaaggaatgagctccaggaacagtactccacatggtagagatgtgtgtatgaggatgttcactgcagaaggtcatgtcaatgtgacaagtgacgagcagcctcaaatccagcaacaggggtgtgggtaaaagatcatagtgtagccatgcaatggaaccaatgaaaaaaccacaattagagcaaatccacatgtattaataaaggaggtgccctccatacatgctgcacctaacagaatgttgccaaataagaatgaaaaatgatgatatttgggctgtaaaaactagaagtcagctaaataagaatgcatcgaaagtatttgtgaatgcttacaattttataatgccttggcatccgttttggatggaagttggactttctcataccagaagcagggctcagtcacctttgaaatagtttccagttctccacctccttccagttcctcagtgtgattgatcagatatctgatttatacaactgcctcctggtgacctcctccctatgggacttccggatacagcccgtatgactgccccactgaccccacaccctgcctgctgcagtgaccacctctaattacctggatctcatgtctgcttgcattaaatccaccaattaaaactccctgaggacaatctgtttgaataatattctgtaccctaataaaggccttgacccatgggttccccctctgtcctccccatactgcccctgacctctgtgtgtgtgtgtgggtgtgggtgtatgtgtgtgtgtgtgtgtgtgtcctccagacagggcctgtatcccccaggacctgtaagtaataaatctttattttcatcttatgtctctcgcaatcattggcaagagctctgcatcttaaagatcgcaaatttaagaaattggtgtagtcggcacaatagagtacctcttctgtttagcacaagatatctcggagctgctgaggcttttaacatcctcgccggtgtggctgcctcactggtgaggccgttctgttcagtgcaattcagttgctccactgtgtgctgctgtgttgctgctgtagagtgctgccatgttgttctccccaaattgttaccgagtaggaacctgtaatgtgctcccaaggtggtctaccccatgagaagggggattctccatctagggcaagggctaggtgtgtttctggaatcctaatagggaaggcatccacagagggtgaactccactcctccttagagtgaggagtgacatttcccatttattttccccatggaggtgccatgtattgactttttctttcactgtcccaaggttgagccaaggtgagctatggagaccagggcaagataccatttctgttagcaaagcaaatgggtgacaacgtgtggagaagctgtggttctcctgatggatatagcagagtgccatttagtaaaatcttgtcaggaggctgcccctggttagaccggcagtgtctgtagtcactaaggtggatgcgaattttaggccctgggccatggataatccctgcagacacagccgtggcttcatgtgatggggcaatcccgggctagtggctcccttgtttctgcatttcttgctgtggttgcacaatcaacacctcaggggttgattgggtcaccttggaaagagaaacagctgcctaggaggctggtgcacatggaggccaccctcaattttattctgctaacaagttgtaagattaaaacaacagggggctttgggtaccatcaggaacttgtcaagtaaacatccaaagacagaaagaagaaaaagaaaaagacattaaccgtctagaaatacaagccattttaaagattttgcttaaaagatgcgcttgggctgggagcggtggctcacacctgtaatcccagcactttgggaggccaaggtgggtggatcgactgaggtcaggagttcaagaccagcctgaccaacatggtgaaacctcgcctctactaaaaatacaaaaaattagcagggcatggtggcaggtgcctgtaatcccagctacttgggtggagaatcgcttgaacccgggaggcagagacggcagtgagccaagatcgcaccactgtactccagtctgggcgacagagtgagacttcatctcaaaaaaaaaaaaaaaaaaaaaaaaaagacgggcttgtttcgtcgttgtggagtcatcccagagagaggctactccctagagtcactgaccacctttcctcctccatcttttcctcttatcattctagagacagaaaacaagaatctcagctttaggtggctaacctcaccccccaagaaaagaaactaccactttgattgactacaaatccaagaaaaataaaagagaaactttaaaaagtactgagcaaaccacaggtctagcaaacataatgctagccctaggttacttattcatttacaacaaacccctagatataggaggaaaaaataaaaggtaattaaatatatacacatacaatattttaatataaatatataataaatagttaaattatgtatgtataatatgtaactaaatcaaagtaaaatttcatactttgattctattggaaattcaaaattcatttattaacttatatattaaggaatttatgtaaaaaaagatttttaaaagggcaccaatttgcttttgtgtctctacaacataggatctaatttaactttacatttgctaaatacactaattgacaaatattcatggatttaatcaatactggggctcaaattgtagccacacgtgggaatcccataaatttaaacactctgtccctattatcttgagaagaaaactaaatataaaattgaaaaaaacaggtatgtctcaatttacctgtaactttgcctaaatttcccggagtcatatacccattgctgtaaaacattctctattggacataggtgctctgagacaataaataaaatagaagtgtttttggtacttagacattggcttgacaaaatgggatcccatgaaacctcagttaagatagtgaatacggcccaatgtgagttgaaatggggcctttaaggattaaaacttattacatgaaacctagtaagtaatggggtgattatccatactgcttctccatttcatagcccaattttgacagttgtcaaatctggaaaaaacaaacaaacaaacaaaaaaacccctgggaatctgttgcctcacagagacacaaagtagacatcaaaattgtatatctcagttccagttccaaaatggtggcatagaagcaagctggctttactccttcacacagaaaaccaaaaacaaatatacagcaccaaaattattaccagatatattccagaactcaaatatgaaaatgaaacagttttcagagccacagagaagtgaaaaaaactcccgacagatgacaaaagaatcagatttccccatctgtaatgtccctccctgccccattctgcctggtaccaggtgtgtggaaaattttaccccaactcatggtttctacactgggaaatgtaagatcaatgcgggcaaccagtttctgcacaatcctgggttccctgtccctgccttaacccacaagaagcattgtgagtgcccgaagggagaaatttccctgaggacagtcaaagagtggggaggcaggactaccatctccttccctggaaactctgctgtgtaactcagccaagggagacatgaaatcagactggtgtttcagcagctccatgttgtagtaggtttgtttcacaggtatcctgggcatggacatctagccagctttcccacactgccaggatatcccctttgggacctccctcagttaggaagggcacactctgatcatttactagggccaaggtaaaccctaaaggtaacttagagatgaaaaggaggtagtgacctagcagtaaagaactctaagaaaatctatccaataaaaatcaaaacaagccagacaaagactaaaataaataatgaatccttcaatgtaaagacctggacttacatccacaagaaacagtaagcaggtaaccatgatctccccacatggacaaagtgaggaacaagtgactgatcctgatgagatggtgatgtgtgagctctctaatcaagaattcaaaactgcagttttaaggaaactcaatgatcttcaagaaaacatggaaaagcagttcagaaatttatcagagaaatttaacgaagggattgaaataatttaaagaaaacaaacaggaatcttggaattgagaaatatatttgctgaacaggaaaatttattagagtctctcaacagcagaatggatcagaggaaagaatcaacccaaataagactcccccaaggcataaaataatcgaattctcaaaagtcaagggcaaagagaagattttaaaacagaaagagaaaagaagcaaatggcataaagaagctccaattctgtggcaacagattttcagtggaaatcatacagaccaggagggagtgacatgacattctcaaaatgctgaaaaaatattgacatttgagaatactttatccagtgaagttatccttcaatataaaggagagagaaagtttcctagacaaacaaaagctgagataattcacaccatcagactagtcttcctgtaaatactaaagggtaaatactaaatacttcaatgtgaaagtaaaaaaaaaaacactaacatgcaaaacaaccacaacaacaataacaacatttgaaggtataaaatccactggtgaaattaagtacgtagacaaacccagaatactcaaatagtaattgtggaaagtaatccaatcataactctagcatgagtctcaaaatataaatctatcaaaaacaataatacattttaggaggccaaggttggcagattccttgaggtcaagagttcaagaccagcctggtcaaaatggtgaaaccccatctctaccaaaaaatacaaaaatttgcagggtatggtagcacatgcctgtcgtttcagctatttgggaggctgaggcaggagaattgcttgaacccaggaggtggaggttgcagtgagctgagattgcactactgcactccagcctgggtgacagagggagactctgtcttaaaaaaaaatagctacctgtttggagaaaggtaatataaaatatgtaaatagagacaaagtcaaaatttgcaaaggatgaaattaaagagtagagtttttttggggggttttctgtttctattattttatttgtgatctaagataagttgttaccttttcttctcttgaagatactttgttatatctatgtttttggaagtcttatggtaactgcaacgcaaaaaatctatgatagatccactgaaaataaaaaacaatgacttaaaacatactaccagagacaatcaaccacaaggaagacagtaaaaaatgaagaaaggaagaggggagttacaaaacaaccagaaaacaggcaacaaagtggcagtagtaagttcttacttaaaaatattgaacactgaatataaatggactctattctccaattaaaaggcatagagtggctgaatgctgcctatatgctgcctacaagaaaccacttcatgtaaaaagatacaaatagactgaaagtgaagggggtggaaaaagatatttcatgcaagtggaaaccaaaagagagcaggagtagctatactgatatgagataaactacaaatcaaagactataaaaagagacaaagaaagtcactatgtaatgataaagcgctcagttcagcaagaggagatgccaattataaatatctatgcatccaacacttgagctcccaagtctcccaagtatttaaagcaaacaatagtggatctaaaaggagagatagactgaatacaatattaattaggggactttaacaccctgctctcagcaatggccagatctttcagacagaaaatcaacaaggaaacttcaaagttaaactacacactagatcaaataggcctaactggcatttacgggacatttcactaactatctaactgttacagaattcacattattttcatcagcacatagaacattcttcagaacagaccacatcttaagtcccaaaaccagtcagaataaattcaaaaaagtttatatcacatcaagcatttgttctgaccacaatggaataaaactacaataaatgaataactttctggacacatacaacctaccaagatggaagcatgaaaaggcagaaaaacccaacaaaccaacatgaaactgtaacaaaaggaaaacccaggaccgaatgacttcactgctgaattctaccaaacatttaataagaactaaaaccaattctactcaaaatgctttaaaaaattgaagaggatggaacactttcaaactcattctacaaggtcagcattatcctgataccaaaaccagacaaggacaggacaaaaacaaacaaacaaacaaacaaacaaacaaacaaaaaaacactacaggattgcttgaggccaggagtttgagatcagcctgggcaacatagtcagaaccaatctcttaaaaaaaaaaaaaaagaaaaaaattagccaggcatggtggcatgtgcctttagtcctagctactcgggaggctgaggtgagaggaccaattgagcccaggaggttgaggccgcagtgagccatgtttgtgtcactgtactccagcctggggaacagagcaagatgctctctcaaaaacaaaaagcaagctgggtgtggtggctcctgcctgtaatcacagcactttggaaggctgaggtgggagaactgcttaagcccaggagttcaagaccagtctggacaacatagggggactccatctctcaaaaacaaccaaccaaaacaaagccaaaaaagaacataggccaacatcactaacaaacatagatgtaaaagtcctcaataaaatattaacaaaccatgtttagaaacacatcaaaagagatcattcactatgattaagtgagattcatcccagggatgccagtatggctcaacatatgcaaatcaataaatgtgatccatcacattaaagagaaccaagaacaaaaaccatataatcactccagcaagtgcagaaaaggcatttaataaaagaatgggttgagggagtggagcccatagtcagagcagcagtggtctgggattttggaagtagaaagaagggcagcaccactggccaggaccaccagggaacacccccataggccctgggtgttgtgctccagggagggttccctctggagttattaatcttggtgtccactttgcccagctgcccctcacagggtcagggaggatgaagggaaagcttccttctaatgaaagttcagggactcacagttcctagagcctgtagggagaggaagatcttcgaggaagagcacctgggcattggggcgtttgagaggaagatctatgccaggtccaagtggacaacctgtggactctctctccagggacatacgggtatctgggaatctcctgtagcttaaagaggtaaagacctctccctttagcctgaggactggaggatgctggttcaggtgaatgagtcctgcaggggctggtacaggcctggagggtggtggtgtccagggccttgggttcacccttagcatgattcaggccgggcggtgtttcacatgagcaagagggcctgggttcattgcttcaggacaatggtgaaatctcatggtggaagaaatcttgtccttgccagtgcccagctttcatttggtcttggcccagagtgtcctccctagagaagactcttgtcccttcttcacactgcccttcagggatatgccagccttatgggataagatggggtggagactgtagatgtgggtgggaatctctccacagagtgctccttctctcagcggttgcaccttgtctcagggcttcagcttgaaatctgggatctccaagcccttccctccccagtcctggccaggaccacatgggcagatgcattgtgtgaagtgcatttcatttggggtgtcctctctgcatggcaccctcccgttgattctctttgcgcatgtcagagtgcaggcaccatccacacctcctgctggaggagggacggagctgttgactcctgagagctgatcatgtgttcccaccctcacacacaatcatggtccatcctctgagggacatgtgttgccaccactgtggagatggtgcaactgacagtaacaaacagtaaaatctggtactgaatgggaccttaagccaacaatgacaatgtcattccaaggtgtttcatttttattgattcaatgcaagtcacctgatttcattgactattcacaatagctcgataaagtaaatgcatcatcaccaccactttaaagaggaaaaaggtgcttgggcagtttgtgactactgtggtggctgctgcattgctctctggtaaagccaagtaggtggtgggtgcggcctctgggctgggatgatccaccctcctggtggtggcaggggagccaagctggagccatggcctgtgcagtggtagcagctgaactgaccgctgctgcaggatttgcaagctgttacattttgcgaagccatgaagcacataaaacctcaagtagaacaagtgtttcaaagtctaccaaaatctgccttcagagattattactacagaggtggatatgaacccaaaatgacaaaacgggaagcagcattaatactagataatgaatgaacactagtaatagtagggtaagccctactgccaataaagaaaaaaataagagatgctcattaacatgttatgctcttaaatcacgcagacaaaagagggtctccttatatagtagccacaatcaatgaagctaaagatttactgcaagatcaagctaaaaacagtaggtgtataatgaatttttaacttcatattagtttatgtatatgaatatcaagtttttataataaaatgcctccaaacaaagaatatttgatttagggtttaataacttctaagaggggactcagatgtttcctgtttcacagtcagtctgagagggtcatttttcctggagctgacctgggtggaggcctcacactgatactccccagcatcctctctcctgatggggtttatgctgagcatacagtggccctgggacagctccattctctccatgagtcacagacgctggtcatggaagatccactggataaggttccagagtcatctgtggggcaggtcaggatcacaacatccttttcttctgtgactctggtgttgctgactcagatggggtcggagccactgaccctgtggacaatcagtggaggtgctcaactgaaagtgggctgagggcacgtcttctcctccatccctgggtccttaaggtaactgtggaccccagaccaactgacacaggagctagaaagaaattatttaggaagttagtgagggtaagagcgtccttggcaaggtttcccctttaacaaaaagcagcccaagataattccttttctaacaaagagcagcctgaaaaattgagctacagatgtagatgagcaagatggaagcttgcacaggtgaattccagtaggtgtgccaatagaaaagggctgcctggaagccaggtatgttcaacatggagactccatcctcccttttctccattaccacatgtacagtaaaaaaccaggcaacatggcaccggccaggtagacaatccatctgcatgacaaaagatcagagtggggcagccagcaaatggcacagctggtctaaacaatctttcaccccctgtataaatcagacactgcctcctgaagctcatctataaaaccttctgcatttcactatggaagtggcaacccattttccccaggacccctctctctgtgcagagagctcttctctttctttcccctatgaaacttccactcttaacttcactctgggtgcctgcatcctagttttccatggccatgggacaatgaacctcgagtattaccccagatgaatgatgctgtttcacaatcactggttcagctcccttcttcttagggtttcacagctcggtggggagaataccacgcctcagtggtctggggagtgaggaacaaatgaagaattaatcagattttacttagaacgctatcacctgcctcaaccatcagatccatgttgggaatgtccaggcctcctctcttagatctatacccacttcactggacctgaaatcctgtgtttcccgatgtgttggtgtcactcctatgagaggataaaggagagaactttgctttctctccccactcacaccctgcacaagacagggcccaatatgagacacacactcgctcagtagttctctcatgaaggagggagggagtgacctcgagtgattctgccatctgtagtctgtgtaccctggccagtggctgtatcttcatatgcctcagtttcccctcagtaaaataggacacacaatgagaactaaaaataaaattctaattccccagtgaactgaaaggatggcctcttggccaagcggatcccagagttcctgatcatgacaggatgggaggttacacctcattacagcccctccctttggaagtttagaggtgacaactgactagcattaacgctaaaatcgagatcatgagactgacagaacagactctctgtggccataagataccaaattataaactcaacctaaggtcatgcaggcaagggctaagccacactttcctacatttaaagaataagctatgttctaacacagaattttctttctctctagcggctaaagtaacactagccttcgagataagcaatattgaaatgatcgcggctcatccaccaacactggctaactgacccctgttccaacagccacaactacacttcaattggacaggagactgatttcagtaactttctcctaataagagaccactgagcatggcctggttctgctggtatacagacacggtgcactgagtaccataatgcttgtttcatcttttgatgtataagacctaatttaatacatttaaatctgaattctccaccccaaagtgaacatggggtgcatgtagcatgcatgtttgttgatcacgcatgtgcgtgtacttcctttgtgagtatccatagctccacctataacctgttgaatatgtatacctggccaactcattcagcataaatctatcttccacattcccctcccttgaagtgcctgctattggtctctgctggaggctgcatcttctaccctggggaatggccagcctgcaggctgtaaccctgtgtaagaaataacctggttgggtgcagtggctcacacctgtaatcccagtggtttgggaggttgaagtggtagaatagtttgagctcaggagccagagactagcctgggcagcatagcaagatcctgtctcttaaaaaaattttagggaggagagtgaggatcagaaaaaatacctattggctattatgcttagtacttggatcatgaaataatctgtataccaaacccctgattacatatataacaaacctgcatgcgtatctttgaacctaagataaaagtttgttttaaaaactatctgggtgcagtggtgcatgcctatagttccagctactcgagactgaggtgtgaggagtgcttgagctcgggggattgaggctgcagtgaattatggtcccacctgtgagtagccacttcactcaaacctgggagacagagcaagaaccggtctctaaaaaaaaataaaaatagaaaaataaaatgaaaaatatatgaaataaagtctcctttccaaacgtacagatctccgatttttctgccaacaatgataaatggtcagtggcttgccatgttgtctgtgaattacttttaaaatattcacgatcacctgacctaaaggttggtaccaaggaaccgcctgaatacaccgtctctgattatttgcctccaacagagtgttccctgggcctgatctctggtggacaatgagctgctgggaacatcctctcttctctattcctcccctggggatgctgaccttcccttggagtctcctaagttccccagggcagtcggctaatgtcctagggagcttacctgtcttctccataccaagtctcatgtgaaggacgaggctttgcccttgcccagatgaggctctgggggctgagccctggctggctaccagctgcaagagccatggcccttggacagctggtaaatccttgttcccagtcagccctgcccaagatgcctcaacccagccccggcacaggcttcccagggtcacatggagtcaggatcctgggacaggggactggacaggggtttccagggctgagtttctgaacaggggcttcccaggggtcccctcactccaggatctgacatggtcctacaaggaacgtccatggggaggggacccaggagggggaactgacactgacctccccttactgagcctccccccaaccccatcagactgtccttcctctgtagcaagtgcctgcagggtctggatgcaggaaagaaattctgatctgtggaagtttgtctcccctgtgtgtgtcttgcactaaatgtccaaacccccaaatgggatgtaatgtagagggggacacaggcacagcccaggcctgaaaatcctgtgtgtgtgaagcagaactgacccccaacacccagagctcatgagacatcactgtgtacgtgaaactggccagttacttcttcattcacaagatctgtttttatgacttgtagggtgtaggatcctgtgtcattgttggtgacattctgtatcagcagacatgtattggggtatattgtctctcagcctctgtggcaggtcctggggtaattacttgagttcctagtacatatcctgtaattcccctttgtaccagttgtagccaagcctaaggcagattgtgggtgagtggaagaatctccttgccttctgcagcttcaacagtgacttgggcagtggtaggcaagttccagaaagttaaaagtgaggctaggagtggggagagagcatcagttaatactgggccctatgcattgaggtggaaagatggggccctaggtcctggacaggtctcttcatccctcagccttggagtgtgtgtgtgtgtgtgtgtgtgtgtgtgtgtgtgtgtgtgcgcgcgcgcgcgtgcgtgcgtgtcctactgggccaaggtcagcagcatgacctcccttccttcagtgcctctgaccttggcatttccctgtttggagtccttttccccaggggtctgcctggctccctccctactgccttcaggtcctgctcacattagggcatccttgggagaccccttccctgacacctctagagaccctgggtcttccctttctgacctttcgctgctgtgttccctccagggctcttgtcaatacttgacctcacattctagatacccttgcatgtctgtcttcctccctatgagagcatgagctctgtgagaacagggacttgtgtgatcttggttgcaccccagtgcctgggacaggctgcggactcctgtggatgagctcatgagtgttcccagggcccttcacaacgtgggatttattttccaatggctgaggttgttggctaagagctctgttggagttcaatcaggctggtgggaaaaatattagagatagttatagagatagacacaaatcttcttggaagaccaaaaagtttgcataactttggtaatagatctgactgaaggtggtccctttacctttagttaaacaaattaaagtagtaacaaaggaaggcagagtagtttgtctagccagcttgtttactcatgtgatcttaagactaaccattgatgtgccacaggtgcttaattgctttctacttgggaagtccacaatgtcaattaccctctaacggtgttgactcaagcctttgttaattaatcttactgaataaatatgagtctcactagctgatcaaggccatggtcacaactgtttataggactcagcagggagtctgtaagcggccctgacagactcagctggactggcaaagcaaaatatgtgtgtgtcagtgtacactattcacccgtcccccacagctggtgcccctatatgaggagtgctgccacagagctctgtttagtgtcccttgttttttttcttgagtattaccccaacttaaattgtgattattgtcatctgttttcaacattaactgctcagtgatgattcacttggaaaacattaacaatcgagattgtttcttcactaacaacctcagattatttagattttcctgttgtaatcccttcttcctgtttagtgtccaacagaagccctctgtccctctcaggtccccgttctctccaagaaaccccagccagtctctgtgctccctcctcccatccactcccagggagccctcccctcacctgtgagcagaagcgcctgccagggatgtgcactctgtgaggaggggctgagggaggccccatgggctctgctgtctgctttgtcctcctctgtggagaggagcttgggcttcagaaaataaggaggccagaaagtaaggaacaggctgagaaataatggggatgtgtcgaaaggtcacagatgccaacatctttgtcctatgcaatattatccataaaattacaggtttgagatatgcttaaattttcttctaacatgcattaaaataaacatataacttttaatagttatattaaattgtatttaatataaattaaatgctcttgtcagagctactgtgactgtcagctctgctgtccttcctctctctgtgctaagcctcctcccagggcagaagcacttcccagggccaggggtgggggcggggaaaggtaagtggcaatgaggatctgcacaggtagcctttccgcctcctcccctctcagtcctgcctccttgtcttcttttcctctttttctccaatctacatttcagttccttagaccacgctgtgagaagcaaggcttattgggacccccatcccttaacaggatgacctgtgctccccataagtgacctctgctgtgtctagggattggctctgtcagcacctcacagagagtccctggggcccccaaactcagtgttattttctctatgacacagaaacccctctgggtatgcaaggttttcctcatgttttctaatgtctgggaaggttggatttactcccagcagggaggtcacagagatgtccagggagtggggtcctagaaatggacaaatctagagctaaagcccaggtctacgattttcagttgtttttttctgcagtgctatgtgaccctaatttcctaggagtaactaaaatgcaaacctcagacatttgtagacattttatgatttttctctacagcttgtaccactgttattattatttgctttatgctttttcctaaataaatttactttacaaaacatccttgtcctagtagggtgcaggggctcacgtctgtgatctcagctgcttgagaggttgaggtgggtggattgcttgaggacgggaatttgagacaaaacatctttgtcctatgcaatattatccataaaattacaggtttgagatatgcttaaattttcttctaacatgtattaaaataaacatataacttttaatcatcatattaaattgtatttaatataaatttatatacaatacatttttatataataaattatatatataaatgtatatataatagtttttcttttttgagatggagtctggctctgtctcccaggctggagtgcagtggcacgatctcagctcactgcagcctccgccttctgggttcaaacgattctcctacctcagcctcccgagtagctgggattacaggcgcctgccgccacgcccagctaatttttgtacttttttagtagagatggggtttcgccatgttggccaggctggtctcaaacacctgacttcaggtgatatgccgcctcggcctcccaaagtgctgggattacaggcatgagccaccatgcctggcctatatattttatataattatataaagttttctataataaattttatataataatatataaaatggatatttatttaagataaagttattagttttatatatttacatatatttaggaataaatgtgttactgtgggagcccagtgcccaggcaggtagtcagtacatgatggttgtcattagggttaatactttggaattctggattttttcccaagagagtgtctacgctggaatattgggcttgtggctttctgctgatgtgcatgtgtgaagaagctacttccacttattaggacttgtgtatctgtctcgcagtttcactacctattttctcgtgatgttggtcaagtcgcctaacttttctgtgcctcatttacctaatttgtagaatatgggtaacagtacacaagtgtgagtgtgtatttcccaggactgaccactagagggcgtgaaggcaccggcacttactattacagcaatgggtgtagtagtgctcatggtcgtaaacatcattctcccatgaaaggaaccagggcttcctgggagaaataactgattccagggctggggccggaaagcacaagcggagcctggagcatctcgtgaggccagaaagtaaggagccggctgaaaaataatggagatctgtcgaaaggtcacagatgccaaccagaaggagctttgaatgaccaattttgagacaaaatgagcactataagaaataatgatagtaataaattccaacccataaatacccatgagttcctactaatataaataaataattgaatacataaatatataaggatgaagaaacagctttttcttacagcagaattccaattaatgaatgtagaaggaatgatcaaatagaaaatcactatttggctaacagcacagtcaattgtttgtaggcaagaattatcaatggactttaaatatgaatgggtaaaagtatgatgatgctacaactagtgagtaccaagggggaaaaaaaagtacgttgagaagaaacaggctacttccatattcccaaagtatcacttcaggagctacttattgattataatgggacaaatagtaacttacagtagagaaacctggcaacagagtctctccgaggtacaaaggctctcttcaggaaggaggtaaggggaaggaagaagaaaacactgtcctgcctcaattatttgctttccccattctcaagtgtacttcatagacattcaaagatatgtgttgatagtgtccacgatccacatggctctattatagtcatttattcacacatacattcagtgaggctttgagtgcctaatgtgtgcctgatatttgctagatggtggatgctgagaagatcaggtgtgctgctgtctctagggtgactgaatccacctgccccactttacagatgtggaaattaaagtgaaaaggatttataggattagttcactgtcacaaggtcactagccttaaagttacaggagtaaagcaagtttcctgacttgctagattttctgctgcaggtgctgacaatggtgagctccaataggagagaggacactcagagtgaagtgggagccctgaacaccctggattagccaagaggacatgccgggtccagctgtgaccgcacaaaggaccattggggatatttgtattctctttttcacttagagcttgaaatgaggaaaactaagtgcagaaaaccaagagtggaagatttttcacaaagcactggtaacatgcatcagaaaaccctgtgctgatgtctgtcacggtgtttctcactgaacggtaatagtctggctttgagtgtgttccctctacagcctggagttctgcgaggcagggaccaggtgtgattcatctttgtctctccagtgacagtacacagcaggctctgataaatatttcttacaaaataaaatggaataaaaagtagacatctgcacaggtgtgggatgactgagcagcagcagaagcaggaaaagtcagcgtccccagatcagctgatgtggtgttcggattctagataggggtgaggtgccaggatggggatgggggtcctgtggctctgctgccctgggggacacccctaggtttcacagtgcctgctgtggttgctgcactttgcttccccatgggaaagtgatcagagggtgtggggcttcaggtgaccccatgtgggaaatggccaagggaaggtggggtgggcggcacatggttttttttaaccaatatttgaaggtaggttgtatgaaaaggtgttaggcttatttcagcttatggggagtaggacagggattggtgagtgtgtatcaggtatattttggctcaggatggaaaagaactgtcacagtaacataaggtcttttgggaaattacatgtttactggcagagttcaggccagggctgggtgtctgaaaatacctgtcagggtcacttttatggttacaagggcagagcttggcttggaaccaggtttcttactaataccacatattaagtattataaaaactgtcctttgcaataggacattgctctatgatgcaggttgaggtccctctgtttaagtaattgtgggtggctgtgattctctcatctagtctgcgacttggacttcacctccatctgcagtccctctcctttgctgttgacactggtcagagttaagcgcatttactgacgatggtcacagggtggcagcactgcctctctggtattttctaaaacctcttcctggaactgagccagtctaagaggatgtcatgactaagaaaagggcactaatgaggtgaacagataattttttttttcttgtttctcctgtgaagtaacagagtggaggtgagcatggaataattgccttttagaaatggaagacaatggagagaagtgtttcgcaaaccttaatgtgttcacagatcccacacagatctttttattcaatacagattctgatttttctggtgaggcctgagattgtgcatgtctaaggagcttttggatgatgccattgctgctggttggcggaccacactttgagtagcaaggctcgaagatcatttagaggttaattctcactgcatctaatttatggatgaaaacaaaccaaggtccagagagagcatatacagcttgcctaacaaagccattccctaagtgcctgacttcttgcatttaaacccagggcttcagcctttgtccagttctcactccacacatcacacggtttgttcactgttgtgaacgacagttgtggcagcatctctttagtttaggaatccagagccccaatttcactaccctctttggtcttggctcatgctgtgacttcgaatagttttgcccttacttaaaatcttcagtggctcttttgtaatcacaagatcaagttcgaatatctctgtctagtgttcatggctttataacatatggtatctctttagtaaccttacctaacttccctgttttaaaattgtctcttgctgccatagccctccttgctccttcctgctccctaacaaactgtgttcacttctctctcagtggtagtgatgatggcatggcctctgatgttagactcatgtaacttctaatcccagatccaccaccaacattggcaagttgattcatctttctgaggataagcatcctcctctgaaataaacttagatggcggttgagaggggtaaataaaataacacacaaacccactctcatccctgagaccctcttcaaaactagcatataaaaatagctatttgaagaggttcagtgaaattcaaggtaacacagagaaggaattcagaatcctatcagataaatttaatagactgaaataatttttaaaaatcaggcagaaattctgtagctgaaaaattcaattgacaaaccgaagaatgcactaaatctttcaacagcagaattgatcaagcagaagaaagaatttgtgagcttgaagagataatatatgaaaactcagagtcagagagacaaaagaaaaaagaattaaaagaataatgcatgcctacaaggtttgattattaagctactcaaagagatacaagagaagggtgaaaaccaacataaagaaatgtaaaaaacaatcagaatataaatgaaaaattttctaaaatgctagctagtttttttttgagacaggctcttactctcatcacccatgctggagtgaagtggcacagtcatggctcactgcaggctcaacttcctgggctcagatgattctcccacattagccttccaagtagctaggactaaaggcgtgtgccaccaggccaggctaattttttgtatttttagtagagatggggttttgccatcttacccagggctggtcttgaactcctgggctcaagtgatccaggagattcactgccaaaaaggatataaccaagtcatatagtcataggttatctaaagtcaatgtgaaggcaagaattctaagagcagtgagacaaaagcatcaattaacttataaaggaaaacctatcagtctaacaccagatttctcatcagaaaccttacaaaccagaaggtattggggtcctaatcttttggcttcttaaacagaatagctctcagccaagaatcttgtgtagagtgaaattatatttcaaaatgaaagagagaaatacagtctttttcaggcaagcaaatgcttcaggatttgtcacggctagaccatcctacatggaatgttaaagggacttctaaatcacaaaacaaaagatttaaatagaacagaatagaacctcttgaaaccaaaaaattcaaatggcctataaaacaataacacaataagaaaacaaagtagataacgatcaacatgatgactggaacaaatattaacattgaatgtaaatgacctaacactccacttaaaagacacagattggcaagataaataaaaaatcacaaaccaaatatcagctgtcttcaagagactcacttaacatgtaaggattcttatagactcaaggtaaagagatgataaaagatattccatgcaaatggaaaccataagtgagaaggaatagctatccttatatcatataaaacagactttaagcaacaacagtaagaaaaagacaaataaggcaactatataatgataaaaggatcaatcaaacaagaagatattacaatcctaaatatatatgcacctaactttggagctcccacattcataaaacggttatgatgagacctaagaaaaaagatcaacacaaaacagtgagggtgtcctgggttttctttttattggacagcagtgtactagcctatcactttcccagtcaggggatttttggtctccccattcccctaccatgggttcatgccaaagtccatattttttattagtgtttggaattggattttttttttttgaggtggagtctcgctctgttgcctaggctggagtgtagtggcacgatctcggctcactaacctctgcctcctgggttcaagcaattcttctgcctcagcctcctgagtacctgggactacaggtgcatgccaccacacccagctaatttttgtatttttagtagaaacgagatttcaccatattgtccaggcttgtatagaactcctgacctcatgtgacagggaaacaggcactcagtgaacttcatgcgattgaggagttaatgataatgagagaagggctgtgaggggacagcactggggacaccagagcctgtgacgggctgagttgctgtgccttgggagatgcccttttgactgagccctgggaaggagggggtgtgggggcaggagctgcctgcagagggagtggcctcaggtgggcggccacctggctgcagggaagaggtgacagagttcgtgtgcagagcttggagggtgaggaggaggtgggttgaggtgaccttggtgagggtgaaccatggggggctgtgggccctgctgagggaggccagccagccctggacctacagggtggtttggtcttttttgtcccattcccagcatccactgagtggtgaaactctgcaggccagggaccatcccactggccagaaggagcgcacagtaggtgcccactcagtgcatgttgggctggacagaacctcactctgccccctgcccccagctttgggagctgcagcaaggtccctccccctagggatctccatgcctctgtctctgaggggtgagatggggagacttcaaagggccatctcagagtgtgggggatagagacgcagaagtgtgggggatagagggaggcctgggctctagacccaaaggaccttacacacctcctgagtcttttcaaatggtttcttctgttactttaaaaatgatgtaagtcatcatatttattgtaaatcccaggaatctaatcatgcgtaaaataaggtgtcttatccttgaccccaccccttccccaattaaatttccaggatgttaccactgtttgcagttggtgtgaatctctctttaataatactctgtttatctcacttgtcgttttacgccaaaatacccattgaattatattattgctgaagaccattcttttttttttttttttttttgagatggattcttgctctgttgcccaggctggagtgcaatggtgtgatctcggctcactgcaacctctgcctcctgggttcaagtgattctcctgcctcagcctcctgagtttctgggattacaggtgcacaccaccacacctggctaatttttgtatttttagtaaagacagggtttcaccatgttggtcaggctggtctcgaactcctgacctcatgatccaccctccttggcctcccaaaatgctgggattacaggcatgagccaccacacctgcccagaccattctgttctactgaatcatgtgtggtgggcacctcttatatcaatacatatggattttatcttgtgtttgttattggctcccctttttctcattgcatggctacactcaatgctttgtccacacccctgttcctgggttggaatcttgtgacagaaaatgaagtaacaaaggctaaagctttctaaagtggagtcaggagattgcaagacaattgcactttcaccagcaagagctcaaaccacagaatgttccaatagatttggataaacagctgaagtcagtattcaccagccttcaacatctcaactaggagaaccctaaaattaactaagcacatagaatggaatggacttgtgatttaggattccttctcagccaatgagctgcttctgaaaacaactttttgtggaaattacctgtaaagaaaaccctctcctgtgcttgtcttacagaacactagtcagggctgccctgattcagtggacccgaattgctattatttgtttcctaaacatatggtattttctgtgaccttcatctcaatcttttttttaagttactgggctgtttcccagttttcataatgacgagacattctgcagtgtttcatacacatgtcttttccccatgtggagtattgatccaggagctcattcagtcaacgcatgtttatgaagcatcctgtgccaggctgtgggctggtcactgtcttcagcagagagaggacaggcacagtcttgccttcacagagctcacagctcagggaggctcttagaagtgggatactggtcggagcatgtgcacattaaacatgatgaggtcaaggttgctatagggactaaaccacagtcccaccaagatcgcattgagttcctgtggtagaccagaggtcagggcccctaagatgtcctgagcagctccctctgctcagaagttttggttccacaggtgacacacctgagcacaggtgacccctgcagaacctgtgattaccacccaaagccaagagtgagtggtgggtgttctaggaggaaccgtcacctccatgggcagggttggggaagactgaggggagcaggtggctgatgactttggccagaaggtagggggatgggcaggtgtgcgctcatagggaagggaagagaagggagggcattgcaggcaacaacacaaaggttggaacctgccttcatggactgagaaaagcagggagtccacccaggctgcagctggggagggaagacatggggagcagtgggtctaggggagaagcagactgcgattgaccttggggactgggcagtgagcagaggtgtgttatgtgtgtctgtccccatcatagatatgaggaggggtgaggccgcgggtggcacctgggtcggtgggatttcatagtgcctgctgttccctagagcctctctgtatagagggtcagaatagatctgaggctgtggtctgggggaaggggctggtggtgcttaccatctctaggggtgggaggagagggatgaggatgcccctgagcagtgaagcctcaaggtgtgtggagccacagttgtctctcattagacatgtgttttgcgtgaggatgccagggcctggtggttattactgttgtcaagtttgcatgacaaggacccaggtatccagggatccagagcacagggcccctggtgaggggatgaggctcagatggggctgaccaggttcatgtggtcagagtgggagggactgatggagagacagagcctcaacccctcctgtcaggagctgtggctatgtccaggagagatgacaaggatgacccaggacattgagtgagtcattgagacattgaaggtgaggacagggcagagaggaccctggtgactgctgaaatgtaggatgtgaggagggctctgacccatgcaagttacaggacctccccacccccgagcccacagatgacccttaaattgggcatcctgagtgctgtgtgtgcccagcagggacactggataggctggacctgagtctctgtaagggcagcgctggtctgtaggaccagagtcttctctgtgggtgtgacgtgggcaggaattagcaagatgggggtgacaaggcttggcttggaggatctggtacagaagcccatgggcttggtcagctcagcttctcaggggctcagctggggctggaggagcaggatgctgtgctcagggcatgctccaggcagcgtgatgtgtgtggttccagggtcaggcacgggggtcaaaaattaaccatgaaaagttcccaccttctgtaggcagagaaaatggcctgattgtcagggtcagggagacttaccatgtggccaaagcaggctctcagcctcccagagaccacaccctgggtgcagcactcagctctgcagggtatggcaatagatgtgccaagaaccccaacatccagatgcatgcaaaaattttgcgatatataaaatagagcagatcaagtttccctgcaataacgttgttcctggttgtgtctttttcttgtaaactagacatggacatctttccagcagtctgttctcatctgccaccttcctgctgcagcacctcagaatgaacattcctgagacactgtccgtggtgctgacgaccaagagctatggaacagagtgtgatgtagaatcttctagttacctctgctctcctttcacttttaacaacagagcatcattaacaatgagaaggtggagaggtgttcaggatcttgaagtgacttctgtcttgctctcccataaccctgaagctgctgtagacattattgcagaaactgacaccacagtcaggatggccttgtccaggagcccatgtgcagtttgtagtgagcaaggatgagaaaatggtcttgaaaggggtgatggacagaacaggggcttttcaaaaatgtcacatcatcacccccagcatccgtgaatctgtcacatggtaagagaccttacagattaaatgaaggattatgagtttggaagattattgtagtttatccagatgggtccaacataatcacagaatcccttccttacaaatgagagagggaggtgggagagtcagagaaggaggaggagatgtggggatagatgcagaagacagagcggtgtcaagatgctgcactgctggctttgaagatggagaaagaggacacagccaaggatgcaggaggcctctaggaggtggaaaaggagaggaaacgcactctgccctggagcctccagaaagaacgcagccatgtgggcaccttggttcaagtttctgtgtcacttagcttgtgggaatttgtcacagcctcaacaggaacctacagaggagtcaccttgtgtgcaggtgggatccagggtcatttacagctaaatcctgatgtaaatattgcaggttgcttttcctacttcctatctcatggccaacaaccctggacaatggcagaacacccttggaaaccacggctctgtgctttagtggagggaccagcttgtttgtgggaaggtagcacctggtccaagtgaacctacatgagatcgttactctccccagggccctcagggaagggctgagaacagctggcccaggtgtgtggaggagctgcaggtgaggcagggctggaggggcctgtgggtccaggtagaggggcagacaggttgtcccatcgccatgggagcctgcacgagctttaggttggggaaccctgctcctctgacctggacgctcctgtgtggagaggaggcttgctcagtgagatccacgccagggggtaaattgggaactgatgggaaatgaggggctagagtcctgggtagtgcctgggaggaccttgctcaaggactgaattcttggtctgttcccaccttggttactctgacaacccctctctgtgtcccacggggataaagatctcctgagcagtggccattgggacagaggagaacctggtggccagagctaagcatccaggatcctggatttggggacaggcaagctcattgctgggggacagtgatagatacggcctccagggcctgggtgaagagagcaggagggctcaggacactggaggctgtgtggaggtcacacccacgatctgtaccacccatggatgctcctgcattgctcacctttgtgtggacatcagatggccccaacttttgcactcctgagacatctcatgcattcacagagggacccaggctggggctgtgcatggccttggtctctagggtagtgtgaggacagctgagcactcagctggctgggcaggactcctgcgaatcctgccctttcctgtgtagggtccaccccagcctgactcctaaccccctactcctgtctttccagggaagagagactggggttgagataaggtggagatatttttcctgtgtgacccaggagagaatggacatggagtttcaggtgagtttctgctaagttcccatgagcagaaaaagagccaatgagaggaagtttcccctttattcagatcctttccaggtgaccccgggtgggccataggcccattcactttccctgcaagcccccgcttcctgtggtgatgggaagccttcgccttggcccacccagagcccggggcagtctgttgaggtctctatatattcagcagggacccccatcccttcctgtccccaggcctgtgtctcctcaggactcagagctggttctctggctcaggctccatgtccttccccatccccagggctgggggcttcagggacgctccatcaacccacaggagcagctcccagaggaacctaagaagccacatctgctttgtggtcgatccagcagtaaatgtttgtgtcagagtgtagcaattccagtaaaaacagagaagaggtcttgacccctgaggccttctcagaacagggtctggcatctctctctgggcccacccagggctactctgggactgaacctggctgtgctcagggggttcctgctcccaggcccctccctcctctgctcaccacctcctgttattttcactgcagtttcctgaacttcagctcagccagatgccagtggggacagatcctgggtctccctggggcccaagggaccagaatatctgtggcccccactcacctcatagatgagagcagctgccctggtgctgggtaggggaatctgggcaggggagagaggggtgtcaggggacagggaaggattcctgctgtgtaggaattccagggctctcctcaggtgatggagggtcccagggtggggttagcacagggagtggatgatcctggccctgaacagaggcccagctcatggccagggcaggtctaaccttatccaagtcattctgggtagggtgggtttgtgctggggattgacagtccccctgccctgagcctgcacagctggggccccagtggaaatgggattgggaacggacagtcttacctaggagatggagctgtcagagggtccatggcctggggacagagacaaaagtgagcacgagagtgttaggatagctgggcccctcctgcaagagtgtgtgggggtcctcagttcttagagaattggggagagggagcctttctcaggttattttaggggtcaagtaagcaagtgaggttgaggaagtgacccatgacccagagcccggaggttagggctgacccggccagttggggtttcctgtgtgatgttttatgggatcctctttgcagccccagggatagggtcagaggcccctgggtgtaactggcaggagtggacaacttggggctggcttagtagttcccagccacacccagactgaagggacactcaccgggggtggaggctgggggctgctgctccctgaagtcactctgatcgctggccctaggaaaggtcagggttatttgtgaaggtgcaaggttaaaagtcacaaattggagttaaaataggggaccaggaaaggagcctatttccaagaggggtatggagacctcctttctttatggagttctgtggtaggaggggcccaggtgaggggagttgaggaaaggccttacaaagccacatctgtcctggccagaggggaaggactctcaggcagatgctgggccaggagaacattgatccagtgacacaggaaagggactgaggacccagggaaggaatcagaccaccaggggttgcctgagaggaagggtcaaggcaccagggggaaagcagggccaggcacatgtgcaggacactgaggggactgcatgcatcttggattctcctggaactcagtgtccctgctgtgaccagacactccactcagggctggagatgctgaaatgggacaatgatcttgtcttctgtctctgccctttggcaagagacataaacgacattccaggatatgccatattggggccccggttctcccttctcacagctcagtgtctgcagttaccatgtcagtcaaaggggtgctgaccccacccagcccgtccaggctgttccagtctccactatgtgataatgcccaggatcccccctcagatgccctctcactgggtggatggattcagtgaacagggggaggtaccaggtattgagcaccgctcccccctgctccaggcagctgtggctttgctgtgctaggaaactaggaccatgctcaggggcatggccttaattggactgaattcactgaggacaaagctgttgaggaagcagcccagggtcagcagctggtgaggaaggtgccatggaatgagagggaaggatccctggggagtcgggaggctggggagagcctggcactgaatacaagacagggtctccttccttctcgcctggggtcagcgtgaaggatgggagcagaatggggaaaagctgtggtacctgccagtttttcggaggagcaggaaacacacaagtgcagccaccagaagactcccaaccaggaccccgatcaggatgcctagagtgttgtcatctgctgaaagaagaaggcaaaggggatgaggtccaaatctgttccagggggaaccatgaggggccttgcagggcaggggcatggtcagggaggaaggaaatgccatggagcctgagtgtggtctgttgtgctgtcctcatagctggctcccttgctctccgtggttgcaccattttctgtgtcttaggcttgaattactgggatgcatcaactcctacattctcccacaggaagcctgcacctcatcctgctcctgtgttttttagtccctccttcctctcacatcactcctcttccccctgtttctttttttccatcccatggcagtcgtaaagggcaggcccttgctgccaactcaatgctgatgagcagggatgatgttcattgactgttttcaggggccttccacatggaaggcacagtgggaatcaatctacctgcagcttttctcaccctcccattgccttgagggagaagggtatgtgatattgtgaaatacgtatttggtgttcatcaccattgatatggttaggctctgtatccccacccaaatctcaccttgaattgtaataatccccatgtgttatgggagggaccttgtgggaggtaattgaatcatgagggtgggttttttccatcctgttcttgtgatagtgaataagtctcaggagatcagatggtttcataaagggaagcttccctacacatgtcctcttgcctgctgccatgtaagacatgcctttcaccttccatcatgattgtgagacctctccagccatgtggaattgtgaatcaattaaacctctttcttcatacattaccaagtctcaggtatgtcttcattagcagtgtgagaatggactaatacagtaaattggtaccagctagtggagtgctgctataaagatacctgaaaatgtggaagtgactttggaactgggtaacaggcagaggttggaacagtttggagggctcagaagaagacacaggaaaaaagtttgaaacttcctagagacttgttgaatggttttgattaaaacgctgatagtgatatggacaataaagtccaagctgaggtggtctcagacagagatgaggaacttcttgggaactggaacaaaggtgactcttgttatactctagaaaagagattggtggtattttgcccctgccctagagatctgcagaactttgaacttgagggaaatgatttagggcaactggtggaaaaaaaattctaagcagcaaagtgttcaagatgtgacttgggtactgttaaaaacactcagttttatgtatttacaaaggtatggtttggaattggaacttatgtttaaaagggaagcagagcataaaagtttggaaaatttgcagcctgatgatgcaatagaaaagaaaaatccattttctgaggagaaattcaagccagctgcagaaatgtgcataaacaatgaagagcaaaatgttaatccccaagacaatggcaaaaatgtctccagggcatgtcagagaccttcctggaagccccttccatcacaggactggaggcctaggaggaaaaaatgtttcctgggccaggcccagggctcccctgctgtgtgcggcctagagacttggtgccctgcatcccagccactccagccatggctaaagagggccaaggtacagctggggccatggcttcagagggtgcaagccccaaaccttggcagcttccatgtggtgttgagcctgcaggtgcacagaagtcaaggattgaggtttgggaaccttcgcctagatttcagaggatgtatgaaaatgcttggatgtccaggtgaaagtttgctgcagaagcagagccctcatggagaacctctgctagggaagtgttgaagggaaatgtggggttggaaccccgacacagagtccctactggggcactgcctaatggagctgtgagaagaagaccacaatcctccagaccccagaatggtagatccactaacagcttgcaccatgcacctagaaaagctgcagacactcaacgccagcctatgaaagcagccaggagtggggctgtaccctgcaaagccacaggggtggagcccaaggctatgggagttcagctcttgcatcagtgtgacctggatgtgagacatggatacaaaggagatcatttcagagcattaagatttggctgccctgctggattttgggcttgcatggggcctgtagcccctttgttttggccagtttctcccatttggaatgggtgtatttacccagtgcctgtacacccattatatctaggaagtaactaagcttgcttttgattttacaggcttataggtggaagggacttgccttgtctcagatgaaactttggacttggacttttgggttaatgctggaatgagttaagactttggggaactgttggaaggcatgattagttttgaaatgtgaggacatgagatttgggaggggtcgggtggaatgacatggtttggctcttcttcacccaaatatcaccttgaattttaataatccccacgtgttgggggaaggacccagtgggaggtaactgaatcatgggggtggattcttcccatgctgttctcatgatagtgaataagtctcacaagatctgatggttttagaaaggggagttcctctacacatgccctcttgcctgccgccatgtaagacatgccttttgccttctgccatgatttcaaggcctccccagctatgtggaactgtaagtcaattaaacctcatttttaaaaaaattacccagtctcaggtatgtctttatcagcagccaagaccagctcggtcgcggagatcctaacccagcagtgctagaggaattaaagacacacatagaaatatagaggtgtgaagtgggaaatcagggttctcacaggcttcagagctgagagccccaaacagagatttacccacatatttaataacagcaaaccagtcattagcattgtttctatagatattaaattaactaaaagtatcccttatgggaaaccaagggatgggccgaattaaaggaataggttgggctagttaactgcaacaggaacacgcccttaagatgcagattgctcatgctattgtttgtggcttaagaacgcctttaagcggttttccaccctgggtgggacaggtattccttgccctcattcctgtaaacccataaccttccagcttgggcattagggccattatgaacatgttacagtgctgcagagattttgtttatgaccagttttggggccagtttatggccagattttggggggcttgctcccaacagactaatacacccattttctggtatgtgactctaaagtccttagaatcttcaaagtgatgtctttttcaagctaataattgactgatgactggcagcccctaggcaacttcagaatgaggctggtcactgacccaggtaggattagagggttgggactttcagcctcacccctaatccctggggagggacctggagtttgaattaatcaccaatgaccaatgaatcaattaatggccaatgattgaatcaattaatggccaatgattaaatcaatcatatctatgtcatgaaccccaaaaggactgggtttgaagagctgaacccatggaagtttctggagtgtggtgcatctggggagggcatggaagctccacaccccttcccacatgccatgctctgtgcatctcttcatctgcatcctttgtaaagtcctttattacaaaccggtaagcctaagtatgtgtttccctgagtcctgagagctgtttgagcaaactaatccaacccaaacagggagtcatggaaacctcaatgtgaagccagtcataagaagctctggaggcccagacttgtgactggtgggaaggtggtggcaattttgtgggactgagccctctgctgatatgtccaggtagatagtgtcaggatggaattggaggacacctagctgatgtacggtgcagaactgattggctgctgggtgtgtgggagaaacccccccgcatcacatttggtcacagaagtgtgtctgtgttgatgattgttattgtggagtgagagcagaggaaaaacacagtttgagtttttccaaacagggtggaatcccatctgccaatttagaatctgaaacttatagtttcagtacttcaattaagattgaagtacttcaattcagtacttcaattaagattcagtacttcaattaagattcagtacttcaattaagattacagaactggtaagtgaaagtgatacaacaaaaatgtaaccaaagtctgctcaacttaacagctaataacaacaaagttcataaaaataataccagtcgatattgatagcactgattgagccctggctctgtgcatgaccttgttaagggctttaatcgcattaatctctgaataaatatcctcacaaccaccctgagatccaggtgtttgtaacaattctacagatgaggaaactgaggcccaggaggttgagtgtcttgcccaaggtcaaatacctggtacctattgtaaccaggatgataactggatgagtctaatccctgagttcttacccacattgctccccaggctctgaaggaatctcatccttctcattccgtgtatcattttacaccccccctccctcctaggaaaatatacaaggaaaggagtgagaggggccgagggtcactcacattttacagtcagcttgagggggtcgctcctgttggagctgactgggttggagacctcacactgatactccccagcgtcctcctgcctgatggggtctatggtgagcatatggttaaaccaggacagcttcatcctcttcgtgacctgcagacgctggttgttgaaaatccactggaaagaggttccagtgttatttgtgtggcaggtcaggaccacggagcccttctctgtgactgtggtgctgctggcttggatggagggctgagccactgactctgtggatagagtgaccaacagaaagtgtcttggggccatgctgcatcctcagagatctcagagtcaaatttagaacattctcctgtgaataaaggagaaagatgaaggacagggaggagcagagagaaccagagacacccatagcagcgagcagtagggactacagtgacctcagagaccccagggaccaggaggacccagctgcctcagaccaggaccagggagccctgaaaaccctcccacagatgagcggccccagagtcacatgagatgcaatacctggggtggctttaggagcaggcagtcagagaaatggaacatgggtctcagcccctaagggacaaggaagaggtgtggccagctcctcctaggatcctacatccaggacccagtctgtaaagaggttatgattattcctttcttttttcattaattccctccctccttcatcagagaactactgagtgtgtgtctcagttgggccttgtgcaggtacagggtgtagtgggaagagaaagctgagtcctttccttcatcctcccatgggagtgacatcaacaaatcaagaaattcatgatttcacgtccagtgagggaagaaatgtggatctgatgggagaggcttggacaatcctggcattgagtctgatagttgagacaggtgatttcgttctaagtaaaaactgactaattctccatttgcccgtcattcctcagaccagaatctccctctctgagctgaggatgcccaagaagaaaggagctgaaccaacatctggtcctggggtccacagatgccccacggtggtggccacgaccagattctgggctgcagacacacggtggtgtgacgttgagcactgacagcctgtgtgatgctgatgcaatttctctttaataaaatggggtaaatgtcaatggtccctggcttgccatcctctctgtaaattaacattaaaatatttacaattacctgacctaaagcttggcacagaatagctccaaataaacatcatctattattattttactccaaaaaaaaaaaaaaaagagttctctgggcctgattcctggtggagaaggagcggtccagagtgtcttttctctgctttccctcctcctgaggacagtgcacttcccgggacatcttttaagtttcccatccagtttaatggcctgggaagtttgtttgtctgtcctctccactctgactctcaggtgaaagatgaggctctgcccttgcccagatggggctctgggggctgagccctgcctggtgaccagctctaggaaccacggccctgggacagctggtaaatcgttgctcacaatcagccctgcccaggaagccacaacccagccctggcacaggctccccagggtcatctggagtcaggatcttgggacaggggcctggggcaggggcttgaagggctgagcttctctcagaggatcctcaggccaggccctgactgagtcctataagatctttctcaggtcatgtctatgaggaggaggccaagcggggttggactgagactgattttcccccgctgcatctcccgcatcagactatccttcttgctgtagggaatttccacggagtccggataagggaaaggaattctgatctgttatagtttgtctcccctgggtgtgtcctgcactaaatgcccaaaccccaacatgggacgtaatgcagagggggatgcaggcacagcccaggcctgacaatcctgcgtatgtgaagcagaactgacccccaacacccagaggcacggaggaatcactcaccgtatacacggagatggtgagatgcctgttcaatctgagaatttctgtatgtgacttgtagggtgtagtatcccgtgtcctctagggtgacgttctggaaatgcagatctccactgggtgatattgtctctcgaccgctgtatgcaggccctggagtcctaacgtgagtgtctattacatatgctgcgattagctggttgggctccaccgttttccctttgtaccagccatagctgtaaagattctcgggcagataaaccacagagagatgaacattctccccttcagcaacttcaaagggcgctgatgcaataaagagccaggcagtggtgggtgcgttccagaaagttaaaagtgaggctaggaaagggagagaatatcagtcaatatttgacctatgcattggcatggaaagacggggtcctgggtgcaggtctcttcacccctcagccttagagggtgtgtgtgtgtgtgtgtgtcctactgggtcaaagtcagcagcatgaccctcattccttcagtacctctgaccttggcatttccttgtgtgaaccctctttcccaggggtctgcatggttccctccccactgccttcagttcctactcacacaagggaatccctgggagacttctttcgtgaagcctcctctagagaccctgggtcttccctttctgacctttcccagctctgttccctccagggctcttgtcagcacctgacctcacattctagatctctttgggtgtctgtcttcccccccatgagattgtgagctctgtgagggcatggacttgagtgatgttagttgcaccccagtgcctgggacaggctgcagactcctgtggatgagttcatgagcgttcccagggccttccatatcctggggtttatttgctaatgtctgaggttggcagatgaagacagagtttcatgccctggtggtgtttttatttaaattgtcactgtgatatagttttactatcattttcaaaatgtagtggccactgacaatgaacttgaaaacatggaccaactgagattgttttgccccttggcaattccagttcacttagattttttggttctccttagacgctctctcccctgagtctctaacaaaagccctctgtctcctctcagagccccatcctccccaggagaccccagccagtctctgtgctccctcctcccacccactcccagggagtcctcccctcacctgtgagcaagagcccctgccaggggatgcattctctgtggggacaagctgaggggggccccatggtctctgctgcctgctctgtcctcctctgtggagaggagcttgggctccaggaacgctctagacagggttactgtgactgttgtctctgctgtccttccttcctctatgctgagcttcctctcaggcaggagcacttcccgtttatgggcaagggcggggctctgcctacaatgtctctctgtcccctcccctctcagtcctgcctcccttgtccctcctttctccttcctttttgcctatatttggttccctaggcaaaactttgagaagcaacgctgatggggtcctcataacaggacgacccactctccccagtactgacctctgctgtgttctggccttggttctgtcacagccggtagattatttccctttgtgacacacaaaaccagctgggccctgggtctcctcatgctctccagtgctccaggaaggcagaatgatgcccagcaggaaagtgacagaggtggctctgggggctagaaaggggctcactgggtgatggctgggaaggacccacccgctatcttcagtgtcaccagcctggcctctgacccagggacagagacccaggcctggaggtctcgggaggatccccagctcctaggtgtggagggaggtgtcctgtgtgtcctgggaagagaggactttgatggaaggaggtgggaggctctgggttctgctgtccttggtgaaggtttcagggggaccctctccatgtctggggtctgtgcccccagcttaactctcattctctttgcaaatacatatattttgtggatctgcagttgcctgaactgtctcatgtccctaaatctttgtatccctttttacagaaggtcaggaagggtgtgtacatgagtatgaggactatctgatcagggcgagtgtttgtttcccaaagatctctttagatatggtataatacataagataaatgtactgaattagcaattttaagtgtagaattaaatgatactaattctattcacaatgttgtacaaccatcaccataattttttaccagaaaatcttcattataccaaatggaaacttcatacttttaatcaataactccccacttccccctgccccacccactggtagcctctgatactatcaatctctgtgaatttgcctagtttacatgtctcatataataaggaattatatacgtgtattatttttttctggattatttctcttagggtaacacttttaagattcatccacgtcgtagcatatattacagcttctttcctatttatggctgagtaatatcccaatatatgtttatacctcaattttaattcattcatctcttaatggacatgtgggtggtttccacatttttgctattgtgaaaaccgctgcaatgaacttacacttggaagtatctgtttgggtttctgtgttcatttctttgggggtacatataggagtataaatatggggtcatgtggtagttctatgtttaagtttttgagaaacagccaaactgttttccagtttgctgtgctattttatattcccatcagcaatatacgagggttccattttctctacattcttgtaaacacttactatttaatattttttaaaacttatagccattctagtaggtgtgaagtgatagctcattgcagttttgattttcatttccctggtggctgatgaagttgagcattttttcatgtatttactgacaattttaatattttttagagaactatttattcaaatcatttgctgtttaaaaaaaatgggttatctttttattattcagttgtaatagttctttatatattttagatacaagtcccttatggggtacatgatttgcaaaatttttctcatattctgtgtcttctcactttcttcatggtgttctttgaagcacaaacatttttaactttgatgaagttcacttatctatttttaattttgttacttatgctcttgatgtcatattgaagaaaccattgcccaatccaagatcattaagttttactcctatatgttcttctaatggtttgataagttttgctattccatttaggtttttgaaacattttgagttaacttttgtatgggctgtgaggtaggggtctaactacactatctcgcatgtggttatccagttgttccagcacaatatgaagaggctaccattctttccccattgaggaatcttggcacccatgtcaaaaaccaatgggctgtaatggtgagggtttatttctggactcttgattctattccattgatctctatgtgcattcttgtgccagaagcacactgttttaatgattgtagtgttttagtaagttttcaaattaggaagtgagtcctccaatttttttttccagattgttttggccattctggggtgacttttaaaaaagatgtagttcaatggttctcaaagcaggagtggttcagctctccttttttggcagtctggagacctttttaggaccttaatctaagtagataaattattcccactttcttttctgagttgctatgttacagtgtatattgacacccatgaaataattgagagaccctggaagtgcttgcctacatagtgagggacaattagttccatgatcatgggcacagaagattttgttttgggaaacaattttgttggtggagttatattcatgcttactcttttatttgtcttcatagcctgcatctccttcagacttcatatctgtttattttcttgtttgtcctctggggtttgggtgttgggtgaccagtcagctggagctggaggaggtgcttagcaaggcagtgaccctggttgggaggagcagggctcagcagggtgaaagtagctgggccttgagtcaggagtggcatctggaaggcctgactgtaagggtcagaagggccagcaggtgggtgtcctaggcacaaacggtggctgctgctgtggactggaggaaggtaagaggccccgagtattccatgttcttactggctccccaactgaggattcctctcctgggctggtgctgtcctgcagcagggaggggttagacagggacggctgcacatcaggccggagtccatgtcatcctcttaggcactgtcactacagattgaggattctgttcataagccaagcctttgcacaaggaagggacccgggctctcaaggaagagcagctcctggtcagacctccatctccttctctctcattgcctgaggcctcaagcttggtctacctggcacaggggtctggatcctcctcccagggttggggtcttactgagctgggcacctgcaggtgggagaagatctggaggggccccatctgccttcaccagattgatgttgagggtccctgagtcctgcaccactatcaggtgctgagcaacttccagtgtcagtgacaaccaccccatggtggaagcagaaccacctcgtgagaaagcacctccaagcctcagtgcttgccatgtgtgggaatttgctggtttcagttgggggcatgttggtgggtggtcatgaattcagggccggattctatgctcacagtgcacatgctggatgtggtacagaccccaggcagggctcagtggggtggttttgggtgtgcacaggtatcttttctggaggagctggtggtgatttggctcccagaagttcctgagctctgcagactcaccaagcactcaatatttgagtgaacattgggcgagagagcagaaggtaagtgtcagggcatcggggttggtgcctctgggaagaggaggaacattctgggaacaaagctctcccccggcttacagggagcttcccatcgctcctgccttgaggatcagggaaactagggcctctgctcttccaggggctgcttgcaggcagtttgctctgggagggggtgacccaggagttgcctctcattttgcatttgagatttaaaaggagaagggacagtatatcttgccaggtcacaaaaattacaggcatcatattgactgaagggcactcctgtcatcactgcaatataccagaatggtcttttaaaaaaataagtgatttaggtttaccagcaactgtaatgcttgttttattcttctagttcaccgttaatgtcacttttgtagttttagcactggcaatgttgattttatgttgactctgatgattttaagctttcatttgttcacatagagatcatcttctttctgaatattaatgcattttttctctatttctactggttattcctgtacatagagtagagaatcacttttcccaaggaggtggaaagcttctgactaccaaaaaaaaaaaaaagtgtcaaaatgctttaaagtcagtaacttaaagatcaaatccaagagtgggcaacagattctgcccagggtctgaaaggtggagaggtgactggtgaggatgtttaaaagacctctcctctctactccctaaatgggggccatccagtgttcttgaggttcagagaaggcccagggctggggcagcagggcactgtcagctcccagctcccaggggccaggagtaagaccccaacactgtccagacactgattgcattcattttgggggagagtagattcttatttaaagaataatacaaaagtctacaaatatgaacataaacagaaattcctttgctacaattttccccttaataagacattccttcctaatgacatatgtgactgcattcatggctgagatgttttctaggatggtgagagcatcagagtggactatctggtgccttggggtcatgcattttcttcttccaatgtctacaggatcccccatgtcccactttgtagtgtaactcagtgtgtgtcattctggtttttgttgtatagatccttggaaagcccatgtcattcctgctgtgaggtacaggcagccaaatggcatcatctctaaacatgccttctcctggtacatcaaattatggaataaatgaaagccattttgacagatattgaagatataagtttctactcttcccacacatgcttctcccaagtgaaggattttactggtgaattgttattagagattagtgtggatcagtgactctgccaggggaaattttgccctctaggggacatttggcaaagtctggaaacattgttggttgtcagagctgggggagggagtcctgctggcattgagtgggtggatggtgctgaacaccctgcagttcacagagccccaccagtttgaccacccaaatgtcaatgctgaggagtggagagccctgctgtgccctcccgcagcttccctgaagcttcccctcacctgctcctcccatgtctccccaccacttccccacttcacccgcctccttacacctcagtcccctccacctgaactcaccccttagtccaaggccagccctgatctccgctctcctggtctccttgctccttagcaggaggcgcccactagatggcgcccttgcccttactggagctcaccgtctccctttccaccctgagacaaatgtggctgcttttactgccacaaccccagccctccacactctagatttgctcagggagcagctcctggacagacctcagggaccccagggaggagcctcactctggagattttgatggcatggtctttgaacttcactgttacccccagtcaggatccaggatgttgggagtgcatgattctgcccggtcccacttcagcaggaccccactgctgagttgtctgtggggacccgggcctctcatctccttcttgcattgcaggagagggatcttagcactgctttcacataaagtcagataatggaggagtgcaggtgagtttgggaaggtggacatgaagagaggttgtgtccctagaggtggcagcagtgagaggatgggcaggtgggaggaacacagcccatccagggttgccagccatattaggagcgacagcctttcctctaagcctccagcctttttcctgaaacattccagaactttccacttcagcacttcccactgaggctcctcaggtctgtccctgagctcccagctgagcctacctacccatctgaaatcctgagtcctgtgtcaccctcgttccccattattctgtgcagttctgtgggacgcccagctctcctgacacccccagtcttcagaatggccatcagcgctgtcgctgtggcaccagggtgactgccgcctggaggctgagtcctggcttcctgacagctgtggggcccgctctaggctcccttgtcctgatcattcatcacctccaggatgcacagcagctgggccagggggaggagcagggacaggtgtcagccaccctgtgtgtctgcaagtcaggctgggggtgtgggaggacgccaggaatgactgaactttctgatttagagggtgagagcttgcactgatggaatttgggatttaataggaaaagcatagcgttttcctattttgtaggcagggtggctggagtttggaatcatagattcccctgggatgtcactgtggacctcagtcccacccgttaggggcacagatttcagaatccacaccctggggcaaagcaggcatgggaggctccatcagcctggccagggctctctatttgtgcagctgctgcaaggagatgtgcactctgatgggaacagtgctccctcctccttggggggcagtatctagctccctgcagcccctctccctgcaggccctgccctctctgaacctcaccttccccaacccgccccccgcaatcccatctcagctgtaatcccaacactttctcatccattatgggtggactgcttgagcccaggggttcaagactatgctggctggacaatatagcgagttgttgtctctacaaaaagacaaaaattagctgtgcatggtggcatacacctgtagtcccagtcactcaggaggctgaggtgggaggattgcttgagctggggaggctgagttggcagtgagttgagattgtgccactgtatacttcagtgtaggtaacagagcgagaccctgtctcaaaaaataaaagtaaaaaaaaaaaaagaaatatggaatacattattgttaactctaatcaaccatgctatgcaatagtccaccagtaataccagtaatagccaataatgaattatctgaaaaagaatacaatttattcttagctatctactgctaaaatttttaagctatcttttatgatagctgaaacaaaagaagtaaatttaaccaaggaagtaaaagacctttataatgaaaactgtaaaacattgatgaaataaattgaaaaagacacacgcacaaatagaagatattccatgttcatgaattggaagaactgatattgctaaaatgtccttaccacccaaagtggtctacagattcaatgcaatttctgtcaaaacaccaatgatattcttcgaagaagtagaagatcctaaaattagaaaccacaaaaattcctaaaacctgcacaaaacaccctgagttgccaaagcaatcttaaacaaatagaacaaagctagtggcattacacttcctgacaatcaaagcatactgcaaagctatagtaaccaaatcagcatggtcctggcataaaaacaagcacatagatcaatgaaacagaataaaaatcccagaaataaacccatgcatctctagctaactgattttcagccaaggagccacatgcacacaatggggaaaggacagcctcttcaataagtggtgctggggaattggatattcatatgcagaagaatgaacctagaccctatccctcaccatgcacaaaaaattaactcaaaatgtattaaataaagacttaaatgtaagaactgaaactatgaaactactagaagaaaatatagggggaaaatccatgacattggtctaggcaaagagtttttggataaaatctcaacagcataagcaacaaaaccaaatataaacaaacgggatttcatcaaactaaaaagcttttatacagcaaagaaaaaaaaggccagcagagcaaagagacaacctacaaatgggaggagaatatatttgtaaatatatacatatatatttgtaaatatatacatctgataagaagataatatccaaaatatataagaaaattatgtttctgtatagttttatctgactgggatacagaggccacatccacagtcccatcctcaaaggccacttgttcccaaaatgtcaagcacatccctcaatgatccatcatcaacacctatgtctgtaggatgaagggtgaatcatgaagcactaaaaaggaagaaggaagccaatcccaaaacaaaatgatgcagggtctggaaagtccaaagcattttttttttttttttactgcatcttcctcctttcttctccacattcccaatcctcactattgattaacaaaacaaaaaaaactgggacccaccatcttccctactgtcaggagatctagcgagattgtttgagtcttagaccaaactttgccataagccaaatttctggctgactttacaatgatatgagctagcacagtctctttttctgccagtcaacttgtgctcggttttatttgcaaccaaatagaggtggtaaccaaatataggtgaccctaaaattagtcatcaggatgaaatcctaaaatgtgcaacaaactgggttgaattcaggattagtagcaacatctctgttgtgggcttgaaaagggggcacccttttatgcagtagcaaaattgctaaattgttgtttgctgagtctttggactctcatcccggattttctatgaccattcaaacagggctgcaatgaacatctatggttgtttagcttggcacacttctacatttctatatagtaatatctagaagtgcatttgctcaatcacaagatatgcacattttataattgactgctatcgaactaccttaaatagccttaatttgttctcaacattgtttaacagggtctgtttaatgtcctacgtccagcaaggacagtatcacttttcttaatatttttcaaattattggaccttaacaaatacttaatgtgcaattaattgattcctttgtattcccatgccttcttttatatgtttccttatagtacacaaaaccacattattgtttctttacttgtgtcattccaccctggaccattcctatctaaactataacattatgagagagagagagagagaaaacaatatgaaaatataaattgattaatcaaaaaaatttaaataggacaaatcaggaagacacaagagagattttaaaattattcagagaataccacaatagctgtaccaatatattttaaaacttagatgaaacggacaactatctcgataaatgtaaattaccaaaactgactcatgaaaaaatggatattatgaatagagcaataatcagtaaagcaattaaaaagacagttgataatttttatttactgacaacaataacaaaatttcaggtcctgatatttttatggtgaattttaacaaattttcaagctcctcctcaaccaattctcagaaggtttaaaactttaacaagaaaacactttctaacacattttcagaagctgttatagcatgataccaaaaccacacaagaaaattatagaccaatctcacttacaaatatacatgcaaaatcaaacaaaatcttagtgaaccaaattcagaattaataatagcaaacaagcaaaatatgttatcatacgtatggcttatatcaggaatgcaagtatgtttcaacatcagaaaatacttctccacattaacagactaaaggagaaaaacgcttgtttaattatctcaataggtttttagagaattttgaaaattttataaagttatgcgtattctgtaaaattgatgaaatccaaccttgatttatttttaaaaattgcctttcctatagaattataggtaaaggaaacacatgcatcctcacagagctacttcaaggctaagttacttcccataagtaacgtatcctgtaatgtgtgcttggcacatattcaatactaaacaaatatttgcaaatcctcaaaccacttctcgctcaaataacccacctttgtcttttgcctttatgttagggttgattttctcaattgtatcttggagatcctttggtgggtctttcagcaattaccctgaatttgcttttctgtttacaattttaattcctgggaactctttcttgttctctgactgcacccttttcatgagagttcagccatcaatcctccagaaccccaccccccccgcccccccaaaaagcaataaagatgtctaaaagcttccttctgggctttcgaatgatgtttaccccaggcatttgttctattcgttcatcacccattttccctacaacttgcctacacttgatatcagatttttatttattagtcacctatcttcttcattggcccattttcctattttgccactggttgttctcaaatgtgttatgattcctggttgtacagtcaagtggttgataatcttggatatacgataaagatttgctctgtagctgtgtgtaagcctatataaaagcttttgtatttttcttcttaaaaaagacaaaagatggttgggaagatccctccagttcaccagttcgaggctgcagtgagctatgatagcgccgctgctctagcctgtctgtctgtgaaaaacaaggggggcggggggcgggggggaagactggagatgtaaatctcccgcagggccctacccgtatccgcaacaggtctctaacaggaacagcctcaggcctgtgttggaacaaggtaggttacagaaatctggaagccagatctgtaacttcagggtaaggactggctctcagggctgatcccccgggctgggtgtcccagaggcacccgcccccgccccttccccaaggcaggccaggacaccttcactcctctccttaggctccccacccccttctcctccccactgtgcctcctggagtagcggtggcggtgccacaggggagcggggcggggcgggctctgagggcaagggggatgggccccgccggggtcactggcggccaccctggaaactcgacgcaggccggcccttctagtgaatcgtcccagccacagctggcctcccagccgcgcttggggcgcctcggggcgcgaatggtgcaggttggggagactcaccacgcaccgtcgggggtcggtccggttattcctcaccgctcggctccagtgggcgcgcgggcctctcctcctcagttcctgcgctgcagtccctccctcacccttcgcagcttgggaatccaactgtgtcattccgacggagcgccgtgaggacctccgagggtgttagcgccaagtgatctctgtccagcgctctgaatatccaagtaaaggagttcaatgaagggcgggtcaacggaggagaaaccgtgactctctcaagggagcccaaggcctccttgtctaattagtgacgcgccaatggatggaggctcttcccaccatctcttcccagcatccagtgacaccaccgccaagggacgggctcggcggaacctgcaggaaagaagcatcggctgagcctgactgcagcgctgtgaagagacaggggaggggatcagtagttggtcccgcgcccaccccctgtttccgcgaggggcggagttgactggccatgcaggcagagggcgaaatgtgaaattccactactcctaccgtttttccctgacccgatggggcggagtgtcgtcaggctaagttccctggcggtaaggtggggagattgaggcgcacacctgccgaacggtaacgcaggattagctaaggcgagctcaggacagaagcctcccgaggagcaggagggcaaaataataaataaataaataaataataaataactcactccttggtctttatttgcggcaggaattcagaaggtgaaagcggggccttaggatctttctgaccttttgggttttaagcaggaggtgtcagaaatgttaccacagggctagctggcttgtggccagcaagcgttcacaatgccctcgatttttcatccctctctgtgggttctttttttcattgtaaggcagaatttctacgattgctcacccactcagagaacctgagctggtttagaccaggtgagacaggctaggtttaccctggtgatgatgtgttgttgccatggcgatcctgcccagtaccagaggccctgcagattcagatgcttggtgcctgtgcttggctgaggggccaatgggtgaagctgccatctgcgggatgatgactgaagcctctaagtcagaatccgcccaggctgagccttagggcagctccatggagcctcggctggcctgggatagagagtccaccactgtgccagcccccagccactgcctaggtcctgtgctgagagccccttgtccagggaaatggcgtccagtggaaaagggaccacccccttgcccttcactcaaggcaggttggtgacaaccctgaagctaatccgttcctagaggagctgcttctgggtccgagttttctctgcagcagagcagctccctggatgggatctgttcaaagtccgcctttcacgcggaattttccgtccttgcaattttccacctccaccactaggggatcctctctgaccgcctcatgccggctctggcctctgagcaggggtttctcttctgcatgtgcgaccttgcgcatgcctagtggccttttgggacctagagctgctccacaccccgatggggttacagagtgcctcgcctccactccaccccaccagggttccttccctggctgggatgggatttcagaagcgccgaggaacagcccagacaggtgtgggagagtagccaaggcccctgtcccggggtggccaggacagcggtggcctcgcataggacctggctgggctgctgcaatcagtgtcctgccccttggagagcaacagtgaaaacaacaagactatcttcacccaccttaagaaagaacagaaccagtatccccaactctgctgtgtatcccaacccaattccattccccaccccactctcagtagccaatatgcaaaatattagaatactcttactgttattattttcaaccacactctgcatcctgaaaaaccatatatttcgttatgtgcttttaaacttcttgaaaatgaaatactgaggctgggcgcagtggctgacacctgtaatcccagcacttcgggaggcggaggcaggcggatcacgaggtcaggagatcgagaccatcctggctaacacagtgaaaccccatctctactaaaaatacaaaaaattagccgggcgtggtggcgggcgcctgtagtcccagctacttgggaggctgaggcaggagaacggcgtgaacccgggaggtggagcttgcactgagccgagatcgcgccactgcactccagcctgggcgacagcgccagactctgtctccaaaaaaaaaaagaaaaaagaaatactgaattttcaaatacttgctttttttttcggtcaaaattatgttctcaaatttcactcctgtagatgtgcgtggctggctgtagtttttgcatttttattattaggtattctcctgttgcattaatatgccacattttatttctctcatgtttttggtgaccacttggggtgttttttggttttgtatttttgctgtatacatgctgccatggtggacatacctctttatacatatttcctgttgtatgcagacacaattttaggatgtgacatcttcagcttttctattgtgtcgtgtgtcttttccttcgtgctttgtgttatttacatattctggacacagattctttgtcaactgtatgtgctgcacatctctttcccagtttgtgtcttcttcttcttttttttttcttaaaaaaaactttctttatagtgttttttttttctttctttctttgttttgttttgtttttttgagatggagtcttgctctgtcacctaggctgaagtgcactggccgatctcggctcactgcaacctccgtctcctgggttcaagtgattctcctgcctcagcttcccaagtagctgggattacaggtgcctgtcaccacacccagctaatttttgtatttttagtacagatggggtttcaccatgtttgtcaggctggtctcgaactcctgacctcaggtgatccaccctctttggcctcccaaagtgttgggattacaggcgtgagccacagcacctggcctgtgttctttcttaagtagatgttacttttaatataatagaatgtatcatattttgcttttatattagtactttttctatctaattcaaacacatccccaagggtctttgtgtgtagactgaccaatttctcaagaatcatgaatgaatactgcttctctttccccaatttatctgtaatgctacctttattataaagtttctatgcatgtgtagaaatagttcctgatttttcactctgtgccaccagcataccaatagcacgctgtcttaaatattaaatagcagagctttatgagacaacttgatgtgcagtaggcaattgcccccttgttactcttcttcagggttctttgttgtaccacatgaattttagaattggcttgtccagctaaaagacaactgcaaggattttatttggaagttcataattctatacataatttggggaaagtattttcataataccaagtcttcctattaatgaacacagactctctctctctctcccccacccccacctgtttagttatttatatctttatggtctgttagttattgtttattgtctttcaaccaggtttcatgtttttctacatagaggccttgcatgtgaaagtctttcttcctagcttgctattacaaattttttttaattgcactttttgggtacagtggcttgtactgtaatccccgatacctgggaggctgaggcagatggattgcttgagtccagaagttcaagaccagcctgggcaacataatgaggtccctgtctcaaaaagtttgttttaaaaattgcatttgctgttattcaacaaatgtcattgtgtctcatatatggatttttatatctgataaccttgttcaacaatcttttgattctaacaatatatcagattcttttgagttttccatatagacaataatgtcatctgtaaattataattgtttcttctttgttatttcttggaccttttattttatatttttgtcttgctgcaaggcaatatccctctatatattgtggggtcttttttctcataaagtggggatggtgaacacccttgtcttgctctctgattgtataaagcatgctttctgtagcattttgtagacgctcttttttagattgaggtaattcacttttatttctggtttactgagtttttagcataaattcaggctgaatttgagctaaagctttttctggagacatcatttgaaaaattcatatgatttactttctttaagtcaccaaagttatgatttacattgaactgagtttctactgtttaactgtattcttgggagaaaacccacttgtcactgaacaatatctgttttatttactgctgtcttgtgtctaaattttcttttaggattttttgtatatgctcagattagcctgttattctcctttctgtatttttttctggtttgggggtcaaagttataatagcctcacaataagagctaagaaaccagccctaatggaggccggggcaggaggtttggagttcaagaccagtctgggcaaaatagtgagacccccatctctatgaaaaatagaaattagccaggcatggcagtgagtacctgtagtcctaggtacttgggagggtgaggcaggaggattgcttgagcctaggaatttgaggctgcagcgaactatgattgtgccactgtactccagcctggatgacagagcgagaccctgtctcaaaagaaaaaaaaagaagaaataaaaaggaaaagataaaagagctaagcatctgtttccttttttccattttctgggagagtatgtgtaagactgtaattaactgtttcttgaataatgggagaactctgtaaaataatctggctttggtgttacctgtattggaaggatgaaaaataccaattcagtttcattattggttgatagggctactcatgctttttgttttgttttgttttgttttgtttttgagaggaagtctctctgtattgccctgttgtccaggctgagatgcaacgttgttcacaggcctgatcctggctcactacagcttctaacttccgatctcaatagatcctcccgcctcagccttcccagtagctaggactacaagcatgcagcatcacatccagcctcttttcctgcctgacccagttctggtttcctttagttttctaggtgttcatccattttatctaatgtttaatgcatttggcataagggtgctcagtgtcctttcattgtctgttgtctgtaactgttgccattttcattcctatttatgagtactggcgtcttctctcactttttcttaataatcctgctggaactttgctttttaaagaacatcttttgacttgttgattcttttttcatacatattaactattttcttattttttgcctttatatttatttcttttcctgtttgaaacattgctcttttcttactataaaaatgggtaagtagctcatgaattaccacctcttttaaaaatcttttctactgtaagcattttagcagtttacatttgcccacaagtaccacttcagctacaccctatgtgcttttacataaagtcttcatttttggtaagacatattctcaaattttaattatcacttgtttttaaatccatgatgttttatttgaaatgttgtttctaaagatacattttctggttatacttttattcttctaatttagcacagtggccacaaaacatggtctgtgcagtgcatacaatcgatgagtaatttctgagctgtagtatttggcataatatatggcaaaatttcctaagttttccatgtgtgctttaaaaaacttccagtaaaatacataaatctgttagatcaagcttctcacattgttcaaatagtctatatgtttactgattcatttgactgcttgatttatcaattacaggtaggaatgtattcaaatctcctattaaagtgtgacactcaagtggctttttaaagacagagatgccaaaccaatgaatacatgattttccccaaagcctgcacaaattctctaatgaaattttaccatgaaagtttgtttaattaaggcttactaaagcagtatgttgtcttttactttttaaacagagaatatatattttaatacatcgtttaagtttatgattaattatctattactgaggataagaatctttgcctgtgctcattcagcatttgcacttcatttatgatctgccttctcatagcttctgttaatttttatactagagacatttatttgtttgtataaatgttgaaggtttttttttgttgttgttgtttttgagtcagagcctcgctctgtcacccaggctggagtgcagtggcatgatctcggctcactgcagcctccatctcctgggttaaagtgattctcctgcctcagcctccagagtagctgggactacaggcatgtgccaccaagcaaggctaatattttgtatttttagtagagatggggtttcgtcctgttagccagggtggtctcgatctcctgacctcatgatctacctgcctcggcctcccaaagtgctaggattacaggtgtgagccaccgtgcccagctgggttttttatattataaggagatgtaatagatagatagatgtttcaaagatagtcaaatgtttttaaaatttaaaacacttttttacaggttgactttcaccatttaatttcatctatgtgttttgccttagagaaattttaaatgctatgtagatctcatgacttataattatgaagcattttgttttctgttttccacgaaacttagcttaactttgagcatataatagttgtaaaggtaggagagtaacactgaaaaaaggaattgcataaaaatggcacattttctgtagagttgtttatcgcctgaaaataggccccatttcatggaagtaagatgatcaggctcaggtccccagacgaaactcttggcatggtttttggagatagtccagggctcagtactggctctatcatttgctacttctcccaaagtaaccaatatctcatccaccctgagcccatttccatatctctaacatgaggataatagcatctaccttacacaccaagtagagggatcaaatgtaggaactaaatcaaagtaccagcactgaataacctacatcctcccacttcccaaaaggaagagagatgtatcccctgttgacaaacgagaccattttgcaggagagaaaggaaatgccagttcacttgcaatgtaaacatgctctctctttttagggatgtccagggacctgagagagaacccatgcttaccaaagagtttctagttccagacacacaggactcgaagggtgacaagtatggttttcagggtccctgaatccacccagtcctcacagaaactcctaaaagctgtcgattgacagcgttgagttcacagctctggtcctcacatgctgatactgcttgtgatatcgaacccgacaggaccccacatcacaattgatttaccaactacaatataatacctcctgaatctccaaattggctcacccaggaacaaaggcttggggtaaaactggattaggagatataagctctgaattttctgagggtgagacacacaaggattctaagtgacacgccacagagtaacgggtctgtgactggaggacccacagatttgtcttactggagacaccacatgcacacaaactccatccttagctgtggaaacaagggtcttttgctatcttagccgaattctgggagtaatttttggaggggaggagatctttgggattgcctctttcaggccctttacaaaaatacctacttcttaaatggtaaagcttacactaaactgaaaaaattacatccttggctttttatgaagtaggtgttggattgaatcactactggaagaagtatggcatcgcaaattctaagcagtggtcaaaggatggatctgttaaattagaaaaatctctaaatttataaaaagattttagattcctttattctaaacaattgacctatttgtactcatgggacaatcaaatttcaaaggagatatgtaacgatttcatggcttgcattaaaaatccttctgataaaattaaagataaaaaatctgaccccctgccaaaaaaatcttttgaagttcatactgcctgctttcaatattctgtgggattcacaatgaaaggtgccttatattgtggcctagcttcaagtttatgccttcgccaccatggcctgggttcaattcccagtcagggccccagcgcctttggtttaatgtttgcgtggcatttgacttttttacctatttagtattggtgagattacctttggtaaaaaaaagtttaaagagtggaaatcgcaattctttgtgttggctaaaatctgattataagagatctggaaggttttatttttctttttcaaagagctctatggtcagaagtcggcttcatgaaaagctaatatttaattatatgtacatacagtctttctggattttctcttttgcctcctgttttgaaaaatatttggatttgagtgaaactccgttttagaaattaattgcttggtacaatatacccatgtaactaccctgcacatgtaccccctgaatctataataagagttgaaattttgacaaaataaaattagattttgaattaaaacaaataggtgcttggttcctctgctcacttctttttaaaaggaattcctctcccatgtacttcttcttttcccttctttaccttccttttggcatctttggtatcacatgaagggatctagagggaattttaagtgactctgaaattccttgagaaatacacaaaaagatcccactcaccccttttgggggtctcctgttctccttgtggagtccagagtcagggacaggctcctccaggtctgcagctctgctctcttttatttcatcttggctgattgctttggttttgtgagtaccaggcattactttgtactgtgagagacacgtcctttgtgagtgcaacggctgctgggtcactggtgagggctgcagtttggagatggctgagagccgttgcaataaatggttgtgattgcagggggctccttgtttctttgcaagtttagatgagaaaggtgcagtttggacacagtttaaaggctgtgaaaacaccaccaatgaatatgatttcctttggggatggtctgattaaaagtgggctgattgttgctgtgctactagccttgaagacatgtttctacagcattgtgcagtgtggaaaaattgtgtggcttggtcttgtggcatgtcccttcttttagagacctcagattcaatgtgaaattcgggatttttgattttcaaagatctagatgccctgccttccagatgtgcctactcttcacatattttaaaattagatcctataaactgcaaatactttgttggcttctgtgagatcagaggtccagttagaaaaggaagacagtttgttaaaattaaaaactatttatctaatctaactagattggcctccaaatatgactttctgacattcagctggttactctgaaaagatttctaaatctcttgaggctcatctatatgtttccttgcaaagaaaaaaaaaaaaaaaaaaaagcaagcccaagcactagtaagaaaaagatttgcaatgtttcatgaaaggagtagatgagtgaagcatttatttgtagatactgggttggatacctgtgcaaagaagaagaggtcaataataaaaattgccaggggatttcttggaacttaacaagctgaattaaatatagaaatgtcaggaaatcaaggcaggaaatactcacttgtggttaggcagacagggcagggttctgagcttgagatggagcaaacagttgtggtgggtgaagttcacatgctttagagctcagctgtcctagtaaagaagcctaagagtctctaaagctcttatgagaagatggattttttttgcctagattaaaaggttaaagaattgctttaagttggataaaataaagctaaatgtttaagcaagttgtgaaaggtttatgaaaaaattaattaaaatatttttgtgtgtaaacatattgactaaagttgaaggggtataattcagcatttctgtaaattgagcattgaaataaaaacacaatgggtttctcttagagcactaacctgctctttaacaaaaattgtaaagggttatagaaagtctataaaaatgttaccttatggtcaaacattaaaattgggtaaatatgtctatcaggttttattaagaattaggtttaacattaatagtacactaatgtaaaggtgaaatttggcttatttggtacaaaaatcatacaggaagcattgtgaaatataaaatgatttttagctttctttgggctatatttctataaatatgttattgatgagggttccaaagttatgggagactcctataattctgctatatctcagtgtacattatcagtcataattataattgtcatgttaaattattgtgggccacagaggtaacagatttccttgtcaattgtgtctttgactatgactaccctaaaacgttcagtcacccatatacacatgttaccttgttttggccctctttagaaggtaattttataatcagctataaagccctaacaggtgctcttaaatgcaaattttgataactttggagattgtgacatcagaagagaggaaaaatgttcgggacacttggagagctaaaatgttcattgatatcaagcaggacaggaattaactgcatgaagtgaactaataggaggctgaagtgatctttttgactttttgcttaaaacgttgctgatcctttgttttgcttttcagagtcaaggcaaattttcttttgagctattgacagcttttaacgattaatcaaaatatactcctatgaacaccatttggagcattatttgtttctctctacccgatttccccagaatttggaaactatttgtgggtattcttaatttatggcaatatagttatttgcataagtgcaataagaatgtgttttctttggtaacaggacacaatttgaaaaactggttattttaccaaggttttgaccagaatgctgtgctttcctttaaggaatcaaacttgacttgtggagctaataaagcctttggaaaactgaccttatatcctgtgaacacagtccctgtacagggttactgatctgtgggaagaaaagaatgtcacattctgacaggtcaggaatcccaagttatcttgaaacttcaagaggacaggaattcacccaaccatatgtatttgatggtagaaatccatggcaggggctcagctttaaaaagtcttatctcagattccttctataaaacaaagtcccattaaaaccaattttaaaagcctatgtgaaaaataattattcttgctgcacctcgtacaaataaagtggcaaagcataataaagcaaattggtcctgtcgtaatttgtctttagtaaaaacgggaaactggggtcgggtgcagtggctcactcctgtaatcccagcactttgggaggctgaggtgggcagatcatctgaggtcaggagttcaagaccagcctggccaacatggtgaaaccccatctctacaaaaatacaaaaatgagccgggcatgatggcgggtgcctgtaatcccagctactcaaggggctgaggcagggaagcggaggttacagtgagtcaagatcgtgccacttcacgacagcctgggtgacagagcaagactccatctcaacaacaacaacaaaaaagggtaactggagagagggaagttatgtttcaaaaacttttggaaactatagtacacctgtttttaaattctagtctggcattcagtttttattattttctacagtttgggttaaattcgtatttctctggctacaagtctcctaaataatcttttcatttgtttcctttttctttccctttttccccatttttcttaattggaaatcactgaaacctaagctgtgctttcttaaagccctgtgaactgaagactagacaaccgaaacttctgaaggaagtagcagcaacctatttatatgtgttgctgttgcctactattatgttttagcaggtgctgcctctacacccccgaaacagagagtgctactgggaacaaatcgactttttccactccagtgctgcattcggtgccccataacgatgaccccctctcagcaggaagtagccagaaagattacaatgctccatctccctatgattcttgtgataaataaatatacaagcatgatagaaatcatgcgcaaattgacagtggggattgtggcaggccagatttcactaatggaggtccccatcacaactacttcagtactgactgagtggttaagttcagtatcaaaagctgaaagtgccagcgcctttctacaaaggctagaatgtaacaaaagcccaccaagggttttacctaggcctttcctgggccttacagcatgacaaaacaaagaaggaattcttaaccagacctgtttaggattaaacaaatttaattgggggtctgaagaaactcgccaggcctccacaaacaagttcattgggggtctaaaggaaccccccccaaacctctgtgattgagcaggagacaaggtcagggtaattgccccagcacctggactcatttagatttaagtaaatgtactgaggctccagagaaaggtctccaagacttagactagagttacagattaaaagaagttaatcacttatatctttagataaatgcacactgacacgtagacatacatcttagaaaatatataagctctggaaaaccttgtaatttacagttggtctggagatattttctgggccttctctctgtaaccggttccagaaataaaaaactctcttcctccccagtttatctgcatctcgttattgggccgtgagaaatagcagccagaccctgagtttggtctgggaacacactggctgggcttcctgcctggcggtagagcttcactgtcctccttcccagccaaaatgtggcccttgaaggcttcctccccaactgaccggttttgggttctaggtactcagggaacaccgtcttcaaggaggccattttcatactgttcctggtttgatttttctgaaattaggaaatgccccttgaggcatccaggattgtctttatttcccctgaagcttcccctcctgaagaaaaaagttctcaaacaccctcaggactcaaaccccaagttcaccctgtgaaacattcccatttcctaaacccaggcaggctcatggccctcagcctctcagaccccatggaaacctcctcccccacttcacgggttctctccatattgagagcctcccctcctcggcacacaacccagagactcaccccaacatgtgtagcaaatcaccctggaaacaatcatggctgaacgtggtagcccatgcctgtaatcccagcactttgggaggcccaggaggtggatcacctgaggtcgggagttcgagaccagcgaggccaacatggtgaaacctcgactctactaaaaatacaaagttcactgggcattgtggtgtgtacctgtaatctcaactactcaggaggctgaggcaggagaatcacttaaacctgggagacagagattgcagagagccaagatcgcaccattacactccagcctgggcaagaagagtgaaactacatctaaaaaaaaaaaaaaaaaaaggaaaaggaaaagaaaaaaaaaatcatgaggcaacattgcatttaacaatattttatttatcaaaagacacttgtctttctcaggtaagtgaaggtctagagatgaaacgagtcccgatgtaaattgccccatgggcattgctgagatcacaagatcatcactgcagcatgcagcacaatagtaaatttctcaggatggaagttcaacaatccaaaaggtagtattttttttcatgatgctcagtccatcatacgaaataaaaataaattccttttcatgatcatccattcagtagaaaaaatgatagtaaatttgttctcatgaagatttttaccgtaacatataggatttatcgttattattattattctttgttttttgtttttttgaagcggagtctcactctgttacccagtctggagtgcagtcgtgcgatctgggcacactattaacctccacctccagggttcaagcatttctcctgcctcagcttcccgagtagctgggattacaggcatgcgccaccacacccggctaattttcgtatttttactagagatggggtttcaccgcattggtcgagctggatttgagctccggacctcgggtcatccgcccatctcagcctcccaaagtgctgggattacaggcgtgagccaccgcgcccggcctcaatttatcattattcacgcatccacaaactgggttcttatattttgtacgtgattttttccattgaggagagatatctgtgcatattcatgctgctcatatttcatccacaaactcggttcatatttcatccacaaacataattttttccgttgagaagagatacttgtacatatttatgctgttcaaattcacatttcatcattcttttacaagaaatagataatgtattttaaggttttccagtggtattacagatattttactgggtgtatagatagaaattaaaccaaacttctttgttctggccgccagtcatgcatcctgttttcaacatagttcacatacaactggttgtgtaaaaatgaaattattttgtttagtacaatcatcaacagttggttgattagatttttaattatcaagttaatcattgtcattatgcttctcatcgcactcgtcattaattgctgtgggaggaaatttgttatgttccctatgagagggtgtatcacaaattcaaataagaattcaacgacaatggactgtataaaggaaataagcaagtccatggaaaacatatttttttccggaaaggattaaaatatttttaaaaaggaattaaaaaaaaattgggcacggtggcaaatgcctagagtcccagctgctcaggagatggagacagaaggattgcttgagcccaggaataagttggaggctgtagtgaacagtgattccaccactgtactccagccagggcaatagagggaaaccctctttctaaaaagacaaaaagaaacaaaacaaaacaaaaaaacaccacatcaaaaaacccaacaacaaaatgaaaaaccaaataacagcaatacaattggagctattcgatccaaagaagtaaatgaaacataaagcaaataaaagagaaaagctaatacctgtgtcctgcaggactcagtccaagttctgctctgactccctcctggtgagccaccccttaaaaagtcacttggggcggggttactttgacagacagtcttctgtcaaagagggaggcggtaaatagcacttttttttttttaatttaacgcctttccaacaaattagcggctatgttgtctaagagtgcaaatgtcagaggtgggtacaggcagcaagaccctccccacaggggcagcagaaggaggaatgactaagggaacaagactttagtgtgctcaactacacaggacaggaaacagatgctttttacaaaagctggtggacttgaaggcagaatattttcaagttcctgtaactgcgaactatgacctgtagcctgtgagagtgactttctgtggcaaaggagcttttgtgaatgtgaggaagttaattatcttaacagtgggaggttctcccggcttatctagctagaccctcgtgaaatcccaagtgtccttaggaaggggaagcagagagagatttgagtccagaagaggaagaaggtgatgtgaggcccagtaggggaacaaagggcgatggcatgtaaacacttagcccccagaagtgggagagggctggggttcatcacaccagaatccctaacaatcagccttattttaattacccttgaaatggaaggaggccttagagagccagaggcttggaggggcaccctctgctgcatacacagatcccaactgctgtgggctccaaataattgcaccagggaaatcacaaattatcaaaaataaaggatgtaaagcttttaaaaaatattaaaagcccaacaaataaaaaaagttctaaatctataaaattgacctcagtctgtatatttagatgagtcatgtgtatatagcgtttcacttcaaaatatatgataaatctctcattcattggcttaaaaataaacacttcaatcaagtctttatcagaaaaattgaaacgttaactcaattgccttttagttcatgtgactttacaaaacttaaaacaataaagtcagttttaaaaattattagtaaagtaaaagaaaaatatcttcacaatgtagacattttgtccacatgagacatgtgaaatattgccattactaaatatttgcaggtcaaaaactgtttccaaaacattttaaataatcatctggcctgtctgttttagagcattcaattctagctgaggtctggggacatgtgaaaggagccacggcccgactccgtgctgggaagagtcagacattttccacagctctgtcctttgctgtgggctctgcaactcctaccaattaaaattgcttacgtttttgttttatttttactaaagaggggttcctaaaagctaacattatactgagtatatgtaactaaaactactaagaaaacaatttcacaattatacaaatgtgccaagtaaatgaaaaaataaactgtattttaataaaggttataaaaagaaaaacatatagtggtgtgaggactgtctcaggtcttcactgagcaagggatcatgacattctatggcggacagctgaccttggctttctgctcctcttgattatgtctactaagtgacatacttactctttttccacctgtcttgcctctaagggtaacaggttttatgagatccctcctagtgctttgcaggtcagcctccctttgctgcattccaattttactgcctataccctccagctggcttttgatgacaaaagtcctggtcccagccattctcagattctgtcatccccgtgggcactatggagctcagcactatgggaggttccccaaaaatctcgttttctatgaggaatggccaccacctgcatctcagtgatgctagtgacccctttcctactcctgtgctcactggtcctcatgaagatcctggttggtctgtagccccctatttttcctattaaagagaaattacagtaagacccatttgtgtgcaaaatcaattttaggcttattacacttggcctgataatttgcataaaatgcagcaagaattcatcggccatataggctacttttgagttaattttcctgggtttttacctaaaaatatactattttggttagagtcttgtgaaaataaccaatgtgttcaattgttttattttaaaaggctcttactgaacactataaatatgtataagttgaatatacaaactatattgtcataaaatcacaacccaaaatgtggagaacgcagagggaaaggtaaatttgctcgcaaaaacatacttcacccaaataactggaaaaaaaaaaagactttcatgacccttctttaaccagagcagcagctttcaaacaaggtgtttgccttggaaatgccattcacaagccaaacggcccttgagagctgtctgtcaggcactgtagaatctagcagctcctcacagagttagaaatagtttcaggaaagagattccctgcttttagtaactgcactttatattcccagatagcgagattgtatgtaaaccatttttatcttattctggaactcttttgggtactttttttttttttttttaaatgatggagtctggctctgttgctcaggctggggtgtagtggtgcgatttcagggtatgagaaaatgcagctggacctggctctttccaggaagaccctcacagccaaggagtccaaagcctggggttttcatctaattccagtgtgactggggtaggagcagctttggtgctgggtgtgtgtgtgtgtgtgtgtgtgtgtgtgtgtgtctatgcctgtgtctgtttagggtgttaggctcgtggttgtctagatacaaatgtcccagggctcaggagccccagggttatgtcaggggcaccagatgaaggtgtcaacagaagttagggcacaagggacaaaggtgagagcaaggttagattcatttaggtgcaagaaatcatagagggaggagggagaggaagccctcctgctaccaccgaggaagaagcgcagcttaaggcagaaagcctgtccggagaggaagtgagtttgagggcagggctctctgggtaaagtacggtctgggacaccagcctgggggaagggtacagaatgcagagtggcctggcgtggggactaagaacagaggagagcagctttcactgggagggtcagtgttttcagtgtccagcactgagcaaggtgagatttgggcagcttgctgtgaaataaggtcaggctctggcattgtccccattgcgtgtgtgtgtgaggggcactttgggagagtgaactctccacctccatcctctcatacgtccttcaaccgagcttgccagttaccctgattccaaggagatctatttattgttgacaatactggatcctagcagaggctgggtaggagcctgggcacaagcaagtggaggagggggcctgggcctgaaagacctgggaggtttgagagaggacacagcccacagaatggagcagatggggtagagtcggcaagcattcagggctcctagtaagttggacaatggagaccctgaaagatccagtaaaacggggagaacaaacaggtccccaactcacatccttgcagtgcctggagcttcagactccagacaggtggggaaggaaaattgagggatgtgaacatgttggagaatgtcgtgccctgaagaatgaagaaaaggggggtgaggaatgagagcaggaacggcttccagtgcctggtgcccaggagaactcagaaaatgggtgtggtggagaggaatcgaggaaccggaagtggtggaagtgtgcagggcccctccgagatcactgtgactgccaggcgtcctccctggctggagagcttcactgtcctccttcccagccaaaatgtgtcccttgaaagcttcctccccaatggactggttctgggtcctatatatttgaaggggtggcctgcctctccacacctgtgggtatttctagttgggtgggaggagagacagagaaaagaaataagacacagagacaaagtataaagaaacaacagtgggtccaggggaccagcactcagcacaccaagggcctgcaccggcaccggcctctgagtttcctcagtttttattgattattattttcattatttcagcaaaaaggaatgtagtaggagagcagggtgataataaggagaaggtcaatgaaaaacatgtgagcaaaagaatctatatcataattaagttcaagggaaagtactatgcctggacgtgcactcaggccagatttatgtttctctccacccaaacatctcagtggagtaaagaataacaaggcagtattactgcaaacatgtctcacctcccgccacagggcagcttttctcctatctcagagttgaacaaatgtacaattgggttttacaccgagacattcagttctgaggggcaagcaggagacagtggccttcctccatctcgactgcaagaggctttcctcttttactaatccacctcagcacagaccctttatgggtgttgggctgggggacagtcaggtccttctcatcccatgaggccatatttcagactatcacatggggagaaaccttggacaataccccgctttcaagggcagaggtccctgcggctttccacagtgtattgtgcccctggtttattgagactagagaatggcaatgacctttaccaagtatactgcttgtaaatattttgttaacaaggcacatcctgcacagccctaggtcccttaaaccttgatttcatacaacacatgtttttgtgagctccaagttgggtcaaagtggctgggtcaaagtggctggggcaaagctacaaattaacaacatctcagcaaagccattgttcaaagtacaggtctttttcaaaatggagtctcttatgtctttcctttctacatggacacagtgacagtctgatctctctttcctttccctacatatattcatggaccacagtcttcaaggagtccatttcctcactgtttttggtttgatttctctgaaattaggaaatgccccattgaggcacccaggattgtctttacttcccccagagcttccactcctgaggcaggagcttctcaaacaccccccaagactcaacacctaatttcaccctctgaaaccttcccatttcttaaatccaggcagggtcatggtccttagcccctcagatgctgtggagaccttctttccctttcatacattctctcaagattaaaagccacccctcctcagcacacaccccagagactcaccccaacatgcattgcaaatcaccctggaaacagtcataagaccacactcatttaataatattttatttatcaaaagacactctttctcaggtaagtgaagttctggagaggaaaagaggagtcctgatgtaaattgccctgcaggccttgctgagatcacaaggagattgttactgcagcttgtagcacaatagtaaatttcttctctggatggaagttcaacaatccagatcgtagtatattccttttcattatgctcagtccagcaaatgtgatgataacaaattccttttcatgatcatccattcagcagagaaaatgtttgtaaatgtgttttcatgaagatgtttaccataacatacaggatttaccattatcaatgcatccacaaactctgctgttgttttttatacataattttttccatcgagaagtgatagttgtacatattcatgctgttcatatttcaaccacaaactctgctggtttttttatacgtaattttttccattgagaagtgatacttgtacatatttgtgctgttcatatttcatgtttcatcatccttttacaataaataggttatattgtattttaagtttttctaactgtagtgcagaaattgtactgggtgtatacatagatatcaaaccaaatttacttgttctggctgataatgcatcatttatttcatagattatgtatttctttgacacatttcacgtacaactaattgcataaaaatgaattttcttttagtatagacatcagcatgtgcttaattcggaatttaattgttgagttaaacatcgtcattgccttttccgttgttattaattgctctggtgggaattttgttatctcatacataagacagtgtgccacaatatctcttaaaatttcaatggcaataaactttatatttaaaaacagggaatctatggaaaacacatttttttctaaaggattaaaatatttttttaaaataattttctaaaaagttaggcacggtagcaaacgtctagagtcccagctactcaggaggctgagacaggaggattgcttaagcctacgagttgggggctgcagtgaactgtgattgcaccactacattccagccagggcaatagaagttaaccctttttctaaaaaaaaaaaaaaaagaaagaaagaaagaaaaaaagcaacaacaccaaaacctcaccaacaaaatggtaaagaaaaaaaaaacagcaatacaatgtaagctatttgatccaaagaagtcaatgaaatttaaaacaaatgaaagggaaaaagtaatacttgagtcctgcaggactcagtccaagttctgctgtgcctccctcacggtgagccacccctttagaagtcacttgggtcataagttaacccgataggaagtgtcctggccaatgaactagggaggtggtaaatggcaccattttaaatttaaattcacggccttttcaacggatcagtagccatgttgggtaagagtgcaaatgtcagaggtgaaaagaggcagcaggaccctcccctagtgcttgggcaacagaaggtggaatcactaaggggacaagactttagcatgctcaagtacacaggacagaaaacatgctttttacaaaagctggtaaatatgaagagggaacattttcaagttcctgtaaccaagaactaccgcctgtaaccggtgaaagtgactttctatggcaaaagcgtttttgaaaaggtgaggaagttaaatatcttaatgttgggaggttcttctggtttatctggctagaccctaatggaatcccaagtgtccttatggagcggggagcagagagagagatttgagtccagacgaggaagaaggtgatgtgagtctgggtgcgggacagggggagaatgatgctatgtggggatctgggctggggaatgacttagctgcatgagcggagtgacttagactcctgaactagaagaaatctagggctcatcacctcagcagccctaaccatcaaccttatttttattacaggtcttccatcgacggactccctaaaaagccagcggcgtggaggggcgccctctattggacaaatagatcttgactactttcggccctcaaatagcctgactaggcaaataacaaataataataatttttttttaaatcatggaaaatattttaaaaaacaattaaaaagttataaatctataaaatctgcttctgtctgtgtgtctgtatatttagatgtctcatgtgtacataatgtttcactaccaaaatatatgatgaaaccctcattaatcggcttagaaaactaaacacctaaatattttctcagaaaatacaaaaactttaactcaaatcccttttaattcacctgactttaaaaatctttaaaaaataaagcatgctttaaaattattagtaaagtaaaattagaacatcttcagaatttagacatttggtttaaattatacaggtcaaatactgcccttagtaaatattttcaggtcataaacaactcctgtaatcttttaaataattgaattacatgtctgttttagagctttaagttctagctaaagcctggggacaaatgaagggcaccatgccccctctctgtgctggaaagagacattttctacagctctgacccttgcagtaggctttgcaactgctacctatcaaaattgcctacatcctaagtttattattaaaaggagttgcttggagttaacattataatgaatatatgtaactaaaactatttctcatacaaagtatatgaaaaagtagaatgtatttttaataaaaagttataaaaagacatgaacatgtagtttttataaaaaacagtaattttgtctagttttgcagttctaaaaagttatgttaaattcaaaaataaaaaataacaagacaagactcaaggtttaaataagttgtaaaagatttgtaaaaattagttctataaaaattttacaaaaaaaagcattggttaaaatttaaggaattattttgtttttacagaaattaaacattcattaaaaacactctgatacaaggccttaatttgggttcatgtatcagaatagcagggttttcttagaatattaatctattctttaaaagaactatgaatgttatgcaaactttataaaaatcttaccttagagtcaaactgattaaaattccatagattttacgtaaaattttattaaaaattaacttcaacaaaaataaaatttgattttctcctttaaacaaaagttttgcgtaatattaaataataaagcatttttgtttaccttttaaactataaacacacacacacatacacatacaccaacactaaagtcagctgacctcatactgtctttattggatattcttgtttaaaaaactatcttctttggaaaataaagttttttattttaaaccatattttaaattatcattttgactaaatccataacatacagtgatctgtaataattctattttataatatcaagtgttttgaagaactccaggaacagccatgagagaacactgtggtttagtaacactttatttcctcagtttgaaaatagttgtctttcttggggaggccggtttcagcagatgaaaacaagagtcatgatgaaaattacccagcagtggttagtgtgaccataggaacattgtcatcaggtcagcagaaaacatatcagcaaatttttctcatactggcagtgtgtaggggtggatgtttacagttcctgaagccccagtggtcgtgtggtcttttagttttgccatttataggcaacttgtggtaactagctcaattagacacattccttatcacaaggacagagggctttctgtatcctagggttcttgccttggcattccagaagaatcaggtcacacgtggacgtggagaatgagtgcaaggttttattgagtggaagtagctctcagcagatgggggagccagaaaggagattggtttctccctggattggggccgttcagcagccctggctctcctctgactgccccaggcaaaatccacatcgttctataagtcggtgccctgctggtgtgctggtgcctgttgtcatgttcctcttcatgtccagccgcctgtgtgttcctccgctgatgtgctcctctcgacgtcaagcctcctgtgtgtctgactgctagggtcttggggtttttataagcacaggatgggtcttagcaggccaggatgatcttgggaaagacaacattcggtcaggaaaacaaaaatgcctgttgtcatctaggtccgtggggacaagcccaggtgtggagcttttagccagggaccacagcctcctgtatccaacacttcccttcaccttttctatatcattcaaagggatcatgcccttcccatcccagcacttcactttcatgtcatttgccccctctgaagaggtacatctaactgccattagaatatggatgatgaccagtcttagctgcttcctgctgaaagggggcattgttttgggggaaaacggcagtcagattcctcccaggggtctctataataaaagatcgaggtggctactttcaggaggtcctctaatgtactatctggtcccaagtcccatttctgcaacctcctcctgatgtcaggagctgcctgagtaataattttatcctttaggattatctgtccctcgattgaattaggagatagagaggtgtgatttaccaaggcctctcttagcctctccaggaaggcagtgggattttcatcaaatccctggttaattatggacaacttagtataattgagaggcttggtcttagacctacgtaagccctctattatgcacacctgaaagtgtctcctcttccagtcttccatctcattattgggatcccatttagggtccttcactggtgctacttctcttccagttggataatattcgctcccttccctgatgctataggtgatgcaaagctcatccccaaatctctctgctgctggcagagcagcctgcttctcagtgtctatcaggttctgactcaaaagtaacataacgtctctccaggagagttcaaatgttagggtgaaattctggaaagcttctatatatctatcagggtcatctgaacacttgcccagatctcccttaatttgctttaagtcttgtagggaaaagaggacttggaccttactgggcccaaattcactgggcatctgtaggaggggcaagagtgagactgggcttgtttgggatgaagatttctaggaggggccaggtgagaggctgaagctggatacggaggttggggtggacccagaggagcagggcttgagggagctggcacgtcagctgggggtgcgtctgggactcgtgtctttaattccctgggcttgaccctggcagccttccccgagacagcaaacaggagggctggaacaatcctacatgtcagcaaaggtctggattgctttgcaaggtatagaaagcctgcacatttggggcctcagaccatgtgtcctcacatccagagaaaagttctaattgcaggatggtattgaaatgaatggtcccttcctgaagccaagccagtccttcctgtaaaccataatttggccaaacctatgtgcggagggctatgagatgcttttcctctggattctgagggtcaaaacagtcccaatggttcaggatacactcaaggggagtacaagctgggggtggtgaggagaactggctgcccattctgaaagacagggaatagaggtgttcctcatttcccttccttcttttggcaaaaagctcagggtgtgatggggagggaaagcaagcatcttcacttcactttccacctcttacccctgcgccctggcaaccttggcaggtgccggccacaggtacaaatgcggtatgtacccatgaagcagggagaacctggagattaggaattaactgccctcacctatgtttccttttctccctgctgttgaaaaactttgagttccctgggcctttttatcccatgaggcatggcctccttctgtgggatggggttcagtcagcaggaattggtcctgtccatttacattgtgcctgttgcctggctttgaattcctcagacctgctttctctttctagggcctcagcctgaagcttggaattgagtttgggactgaaaaagcatttcagaggctgtttatatccatttagtgcctcaaataagccctgctgaatttgcaattatcagccagcaggggtcactcctctgttaacttccctattagaaacagagcggtggggattctcacttagaaaagaaaaaaagagaaaaacagttaaagaggcaaaaagtggggaatgctgggggaagaaccccttgcttagtgcaagtgggcccctctaatccttataactttcccatccttcccccagttcagaccaggttgaattccttggccatggaaggaaaggttccattgatgcagtgggtgagaagcactctgtagggtcctggctaccatcggttttctcacacccccctcatcccaggcagtggagggagacacttctgcgacattgctccccctgccccttcatggctattgggtgtggcctttgcctgctgcaggcatgcctaggtgctggagctgggagggaaaagggtaaggagaggtgccctggaagccgctcatgcctggggctgtcaaggtggaggcatacatggcacctctaggaaaaattggtctgatttgcacctttggcggctgagccaaatgctcattttacttagtaacattgcctcagcctgtagcaaaactcttaacattataaaggaagagataagatccatttcaaataatgtgtgagagagaaaagagatgaaaggaaaacagagtcttttacctgcaggaaagggagagaagtggcagagttttggaagaaaggcaggcccaacagtttcccattcactcacactcaccttccgagatcccagacgagccaccagttgaaatgggaaaagtttccttgtccccctcacaggaggtggagtgggggtgtggcttgcttctttagtactccgctgctcaaacctctagggaagcatacagactggcaagttgtggggctacaaccccatggcagcatctaggggtagatgtttacagctgctgaagccccagtggacatgtggtaccatgtgctcttttagttttgccatctataggtggctttgtggtaaccagctcaattagacccattccttaacccaaagacagagggctttctgtatcccgcggttgttacctaggtgtaccagaaaaatcaaatcacacgtggtcttggagaatgagtgcaaggttttattgagtggaagtagctctcagcagatgggggagccaaaagggagaatagttttcccctgaagtcgggttattcagcggcccaggctctcctctggctgccccagccaaactctatgtcaatccattggtcggtggcctgccagagtgctggtgcctgttggtggattcctctcagcgtcgagagtttttccctctcaggaaagggagagaagtggcagccacccatgtgttcttgcactgatgtgctcctctcgacgtccaacctcctgtgtgtctgcctgctagggtcccagagtttttttaggcacaggatagggcatggtgggccagggtgatcttgggaaatgcaacatttggtcaggaaaacaaaaatgcctgtcctcatctaggtccaggggcacaagcccaggtttggagccctagccagggaccccggcctcctctacccatcactttccttcaccttttctgtatcattcaaagggaccatgcccttcccttcccagcacttctcttctgtatcaataggtgatgtttttaaaatttcccaactctagtgcaggcatggtactagacatatacatagaaataaaaccacacttattcttctggctggcaagacatagtatttttgccaaattatgtgttgttttgaagcattttatgtacccctggtcatataaaaataaagctattttgttcagtacaaacagcagcattttctggattagaaagttaatcatcttaaaagatcatcacggatttttccattgcactcatcactaattgctttggcaaaaaatttcttatctcacgcatgacaaaatcagccgcagtatctcctagtaatttaatggtgatgatctttataaaggaaataagcacatcaagggaaaacataattttttttaaaaaaagagtaataaaactttttaaaagtcttttttaaaagactgcttttctaaaatagtaaaataaaactccaccaataaaaccaccaacaaaacagaaaagaaaaaataatgatatgatcggagctatttgatgaaagatggtaaattaaatttaaaatgattagaagagaaaaagcaatacctgtctcccgtaggtctcagtccaggttctgctatgcctttctcctggtgagccacctatttaagagtcgcttaaagcatatgttaatccaacaacagcagattaaaaaccaatgcaatctgaactatttgatctaaaaacataaataaaatttaaaacaaataaaagagaaaaagcagtacctgtgtcctgtaggtctcagtccaagatctgctctgactcccttgtggtgagttagccctttagaagtcacttggggtggggcatatgttaattccactaacattggttctggccaatgagtcaggaaggtggtaaatggcaccttttcttcttgctgatttctttcagttcctttggagtctggacattagtcctttgtcagatgcctagtttgtgactactgtttcctatactgtgggttgtgtgtttaccctgctgatatttcttctgccttgcagaagattttcggtttcattaggtcctattgatcttattctatttttatatttttgcgtttgcttttggggcattagtcatgactacttggcctaagccaatgtctagaaaagctttttggatgctatcttgtagcatttttagactttcaggtcttagatggaagtttttatatgctttgttaaagatcaggtgactgaaagtaccgggctttgtttctcggttctctattctgttccattgctctatgtgcctatttttatacttcctgcaccatttattgaataaagtgtcctttccccaattagtgtttttgcatactttgttgaagattagttgtctgtaagcatttggctttatttctgggttctctattctgttccattgctctatgtgcctatttttatacttcctgcaccatttattgaataaagtatcctttccccaattaatgtttttgtgtactttgttgaagattagttgtctgtaagcatttggctttatttctgggttctctattctgttctattgctctatgtgcatattttataccagtatcatgctattttggtgattgtagccttgtagtataatttaaagcctgccttcagatttgttctttttgcaaagtattgctttggatatgcggtcacgtttttggttttgtataaattttaggattcttttttctagttctgggaaggagaatgatgatattttgatgagaattctactgctctgtagatggctttggagagtatggtcactttcacaatattgattctacctattcataagcttataatgtgttcccatttgtttgtgtcaactgtgatttctttcagcactattttgtagttttccttgtaggaaacttacattaacctacttggttaagtatatttctaagtattttacttattaaaaattctcagggaaatgcaaagtaaaactgaggtgggaaattaaagaaaaataaaattaaaaagaaagggaaataagctttcttgtattaagctaacttgtcccagaggcagcaacaggcacagcccagacccaggaaaagtcttgataatattatttattgtattctggagactcttccagcactccttcaatgtagggagaagaaaaacaaattttcctttgttttatggtatgagtttatagattcttgttctctttaactagtaacttcaagtattctgttttatctaagaagtatggcaaaggtcatgagaagcctgagcaggcctgaactacagctctctaggcaccatagtgaagataaaccaatgcaagcctctttagagcaaaacctagataatagacatctgggttgcatagcaacagttatgtgcaatcctgagttatgaacctgttacaatttgattaactgtctttttcctgcctctgtatccctgctttcacaccactgtaagcttgcttcaagctggcccacccccttttgtgaagtgtgtataaaagtcaagtgctgtctttgttccaggccctgtctttggacgtgagtctgctgggcctgagagcactcaataaaagattctcctgttttaacccaaagcctctctctcatcctcctaaatcccacaacaaaaccacaatgagatgctatcttaatcttgctagaagcccataatttaaaagtcagaaaacaatagatgttggcatagatgtggtcaaaagggagcactttgacactgctagtgggaatttaaactagtccgaccactatggtaaacagtatggggattccttaaagaactaaaagtagaccattcattccagcaatcccattactggctatctacccaaaggaaaagaagttattccataaaaaagacacaagaatatggatgtttatagcagccgattcgcaattgcagtgatatgggaccaacttaagtgcccatcaacgaacgagtggataaagcaaatgtggtacaccatggaataatacttgataataaaaaggaacaaaataatgtcctttgcaacaagttggatggaactggaagccattattctaagtgaagtaactgaggaatggcaaatcaaatattgaatgttttcacttttaaatgagagttaagctatgagaatgcaaaggcataagaatgatataatggacttggggactcagggggaaaggttgggagggggatgaggaataaatgatgacatattgggtatattatacactgctcaggagacagatgcctcaaaatctcagaaattaccactaaggaacttttatccacataaccaaaaaccacatatattccacacactattgaaagaaacataaacattattttaaaaaataaagccacttttaaaattagcaaaataaaataaatatgtcttcagagtttagatattggatccaaattagacagatcaaatactgcctttactaaatattttcatgtcattaacaacttctaaaacctttcaaacagttttttgacatgtcttggaaccatccatttctagctaaggcctgggcacctgtgaaatagggccatgcccccccttatactgggaagagtaagatatttcaagactaagatgttttctacagctccatctttttctttaagctctacatcaaggacataattaaaattggttgtctcctaagtggtttactaaaaatgcatacttaagagttaccattataattaatatttgtatctaaagctacttaaaaattttcacacacaaatctgactgaacaagtaaaatatattttaagtcaaagtttataaaaggacatgagaacatagcttttatgaaaaaattagttttgtcaagtttagaggttttcaaatattttaaattcaggaaataaaataacaaaaagacaaaagaaaatggttgaacaacttagaaaaggtttgttaaaattcatcttataaaacaatctacatgtaaaaagtgggctaaaatttgaaagagattatttaggttttccataaattaatccagaaggggtaggaagtcttaagaatgaggaaggacaggaggaaggggaggtcatcctgacactgcagaggcagaagtgcagctgaaggtatgaaggctaagaggggaggggagtttgagtgctgctgcctggctgtcagagcagaggagggtcctgggcaccagacttgaggaagggatgaaaatgctgggcagacctgtagtgggcccttgagatggcagatagtggtttccagagagagggccattgttttccagtgcccagcactgagcagagagagttttgggcagtgtaaaaaaaaaaagagaacttacctctttctcgttttagaaaaagaacagtctaagaatatcagcagggaaactctcagtgcttcaaggggttaaacgcccttttggctttcttgtgttggtttcatcatagaggaggagaaacttcttggaagtgttcctaaaaacacaacacgtctgcttctcctttcaaaaaaggaagtgctaaaacacgaacactctagatccaaatattaatacggatgtctaaatgcttccgttttccaaggggcagaaagctaaaggttgtaacctattcatttcagtcaaagttggtgaaagggaagcaaaggaactgggtggggcttggaaggatgacgaagctcaagctcattggccagcaacctctctcctgggggcgggaggggtgagcatacgtcattgctttggcttctataaaatgaggaggactcaccgagtgtgaagagtccttctggtgattgcagctgagagcacactcacgacgttctgcaaggattctctgattatgattctgaagggaaaagcgatggaatggacagcagagattgtaattttctttatcttgaattacggaagaaagtatctaggacagaaatccacgacaagtccttggaaccagcagatctcttcgttcacggagacgttgacgtattctctattgaagaagattcttaccttcttactggacaaggttttgtcagttctgcgtgactggattgtccgggagactctgaggaaactgatgtcacatgtttttccaaagaagatgtttctggaaccaacaactgtgattgtggtttgaggacttctgagagttccagtacaggaaataagcagaacatcagctggaggctaaacggatccagacttcactcttcacttcccttcctattcagtctattgtgcctgctgactgagaagcttggctggtatgtgagcaaataaacggaactattcagaaggagatgttgacatattctgtattgaagaagatccttatcttctcacctgacaaggttttgtcagttctgtgtgactggattgtccggaagactctgaggaaactgatgtcacatgtttttccaaagaagatgtttctggaaccaacaactgtgattgtggtttgaggacgcctgggagttccggtatgcgaaataagcagaacatcagctggcggctgaagggatgcagcctccactcttcacttcccttgccattccatctattgtgtctgcctgactgagaagcttggctggtatgtgaggaaataaacggaattataaacaaggagattgtttctcatctacttcattctgttgtggcttttctattttggggttcagggtgtgtgacaaggaccaaggagatgaaaggtttcatgatggagaaagcccaggcaatcagattgaagagctatccacagggaatcttggctgctgaggggctgcaccctgcaacggactgaccatatgacagaaaagggttttaaaggctcaacttctggactgagaacccagagtaatttgggaacctcctctgtgaggagatatgaaagctgggaatcatgacatccctaggaatggaaggcacatttcctgatggaaggggtgctttggaaaacaggagcagagtagacacagcagccttgtggatacgggtgggcagcatgcatgggtgatgtgaacgtggagtgtttgtgatcgaaactcaaaatgtctgacaaagtgaaaacctagaaaccacaatgaggaggaagagtttgtgagggcaatcactctccccatgtgtgaaaatcgggggctcttaaaatctcatctggagaggtgcagtctaccaaactctgggactttagcctccccttttaaaaaaccgtgcatcaataccaacgtccgaaaccacagaaataacacctggcttgcatggagacaaggacaaaaagccgtcatgatgagttgttctgctcacttgctgcctctgttcagtgcacaggatattgtccacccactagcaggctactgcaagagaagtgtgcaatatgttccctatgtgccatatatgtgccatatggcccatatgacaactgagtcagaaaatatctgatgccctcagagttacactccacctggagcttgcccccagccatccaggacctaggctccctaccctgtccaattttctggtgttttgggggcttcattctctaaggtgtgcccactctttactcaaaccaaaacacccacatattcctgcccatgaacaaccaatcaaccacttctcagttccacatcctgctgttgggtctctagtggtgacactgtaactcccaggtcatagtggtgacactataacacctagctaaattgatgccttgtctctaggaggccatgggctcctgcaggtctcatctgactctctgtagccttccctgacaatgctcacaatacccaagccagagccacattgacagcaagctgctctcatcttacctttgccagacctggccactggaaaaggctgaccctcatcctgcaatgcctatacctccaacctttgtctcaagctggtgtcctggagggacttctaagcagaaaacagattcagactcccatcctctcctgaatggcctcatatccaattctcagaccctcagccttcattgtaaggacacttcatccatgcccttgagtattctgtctgcactgtgtattctgcaatagattctcctccctctgcgaccctcaactccttccgcagactttttgttttcttgatcatctaccatagtcttccactgggacactgccaagcccattctggagagtgagttgtgcaagtacactgccccccatctacctttcgggaggtgtatacacccttctttctcccaggtctggaggctttctattttcatcctgaggcatctccacctgctcttggattcttcaaattgacaaccaccagttaacaagaactatgtgtcaccaaatagccaaacaatggcaattacaaaaataaaattaatagctgtaacccccattagcaaggatacacaaatcaaatcagggatagtgggtgaggaagtctgcctaacattcaaggaaggattctgaagtgatacaaaatcattgcctttgctatctttagaatggacactttcagccaggcacagttgctcagcctgtaatcccagcactctgagagccccagttgggtggatcacttgaggccagcagcttgagaccaccctgggcaatgtgcagaaaccccaactctactaaaaatacaaaaatagccagttattgtggcacatgcctgtaatcccaactccttgggaggctgaggcacaagaatcacttgaatctgggagccagagtttgtaatgagcgaagatcatgccactgcactctagcctaggcattagagtgataatctgtctgtggaaaataaaaacattcctcttcaaagttttcttctttaaatcataaatgttggaattaatatatcctctttgaaactcactttcttcaagcttctttatttgatggtagtaaatctttgttaagctttatgaggcaagagtaatggaagaagcatattatatatatttatactctaacctcagtgcttgttctagcaagctcaggcatgcgtgaatgtgcccaggcatgttccagcccataccttatatcctttccttattgggaaatgctgttactcctataagcattcttgtaagcaacttcctctttttctttgtctccactatctttacctattgaggacagttttaggttcttagccagttggatgtagcatagactgtgaggtccaaccccagccaatggagatagcacacagcagtagcgacctcatgcttaacagataaatattcctgtctccctttgtttggggtgctctcagctgatgagcaacaccctttctaaagaaattaaagttgtcttgctgagaaaacttttggtctaaatgctgattcttccttgcagcactgaagaagaagcaattatttccaacactttctcatacacaaaaaaagaagaaggtggaagaaaactttcttgtgcaccctatccctcactcagaaagacaacagaaggctcctagtggcaagccctagaggattcatttcttttgggaaccctcttggctgggatactaggactcaggtcaaactcagcattttcagtgtgtgggaagtgtgcttgggtttcactgttacttccaataatgtgatttggtccttggggttcaccaaattttggtatggagtggtgaaccctgttaagtttaagtgtctataaaattaacaaagcaaaataaccattctgccccatggttcagagaccaaatattgtgtaggaaatgctttagcgagagaaacagagaagaataaaaaatgtcctcaagcgctgcattatttcttgttatcgtccagatcttagaggaaaggctttcattttccctcattcagtatgatattagctgtgcatctgtcatttatggcttttattatgttggggtatgttccctgtgtatgtagttttttcagggtttttgttatgaagtgatgttgaactttatcaaacgtttttcagtttcagttgaaacgatcatatgctttttgtccttcattctcttgatatgatgcatcatgttgatgatttccatatggtgcactgtccttgcatcctgggcatgaattccacttgatcatgacaaatgaatttttaatgcattcttgaattccgtttgctggtattttgttgaggatttttgcatcaatattcatcagagatattggcctgcagtttctttttttttcttttttctttgttttgttgtttgtttgtttgtttgttttgatgtgtctatgtctggttttggtatctgggtagtagtgttccatccccttttattttttagaataatttgaataagactggtgttggttctttaaatatttggtagaattccgaagtgaagtcattgggccccgggcttttctttagtggaaggctgtttattatggcttcaatctcgttacttattattggtctattcatgttttgaatttgttccttatttaatcttggtaggctgtgtgtatctaggaatttgtccatttcttttagattttcaaatttattggcacataattgcccattgtagcctctaatcgtcatttgagttcctgcagtaccaattataatgtctccttcttcatttttgattgtatttatttggatcctgcccctttttttcttacttaggctgcctaataatttcttaattttgttgaactttttcttttgtttgtctcgctctgccaccaggctggagtgtagtggtgtgatcttggctcactggaacctccgtctcccaggttcaagcaattctcctgcctcaccctcccaaatagctgggactacaggcaagtgccaccactcccagctaatttttgtatttttagtagacacgggttttcaccatgttggccaggatggtctcgatctcttgacttcataatccacctgcctcagcctcccaaagtgctgggattacaggcatgagccactgcgcccagcctaattttgtttaaattttcaagaaatcaacttcttctttcattgatttctgtattttttatttccattttatttatttaaactctaagctttattctatcttcttctcattttagctttggtatgcttattgcctctctagctctttaatgtgcattgttagattgtttatttgaagttcttcctctctacaccataagacgtaagcatgtcctcattatgtcataagatgtaaccacttacagctataaacttccttcttagttctgcttttgctgtatctcataggctttgttatgttgtgtttccattatcaattgtgtcagaaatttttcaatatttttcttaatttcttcattgagcaactgatcatttgggagcatatttttaaacttccatgtacttacatagtttccaaaatacctcttgtgatcaatttctagttttattccactatggttcaagaagatgcttgatattatttcaattttttttcacattttaagatgtgttttgtgacctaacatatggtctactttttttttttattaaactttaagttgtggggtacatgtgtagaccgtgcagttttgttacataggtatacacgtgccatggtggtttgctgctcccattaacctgtcatctacattaggtacttctcataatgctatccctcccctaacctccaccctctgacaggacctggtgtgtgatgttcccctccctgtgtccatgtgatctatttttgagaatgatccatgtggattagaatgctgtggaaaagactttggattcctaatatccagggagggagacgatgatattactttcaatatcacacgggtgtacacactctctgtgacattgttcctaatatccagtggaagagaggatgatataacacccagggagggagaggatgatattactcttaatattgcagggtgtgtacccatgcctatgatattgttcctaatatcaggagggggagaggatgatattactcagaatatggcagggggtgtacacacactctgtgacatggttcttaatatacaggggagaatgggacaatattactctcaatatcgcagggggcgtacaaccctgtgatttgttcctaatatacaaaaggggacagtatgatattgttcctaaaatcgcagaaggtgtacaacgccctgtgatattgttcctaatatccagggcgggagaggatgatattacccccaatatcacagggggtgtgcactttccctgttacattgttcctatgatccgagtggggggaaatgacattagtcccaatatcgcaggatgtgtacactactcccccatgatattgttcctaatatcaagggggagagaggaggatattactcccaatatcgcaagggaggtacatcctccatgcaatattgttcgtaatattcaggaggagagaggaagatattactctcaatatcgcagaaagtggacacccaccctgtgatgttcttcataatatccagggaagcagacgattatatgactttcaatatcgctgggagtgtacatcccttttgggatattgtttctaatatccaggaagggagaggattatattacttccagtattgcagccagtgtacacatttcttgtgatattgttcctaatatccagaaagggaaaggatgatattactcccaatattgcaggtggtgtacacccccctctgatattgttccttacatcaaggaaaagaaagaagaatattactcccaatatcgaagagagtgtacacccctcctgtgatattgtatttaatatccatggggaaagaggatgttgttactcccaatatcgcagggggtttacacccacactgtgatattgttcctaaaatccagtgaaggagaaaataatattgctcccaatattgcagggtgtatacaggccctcccccgttatattgctcctaatatccagcggtggagaggatattactttcaatttttgcagggagtgtgtaccccctctctgatatttttctaatatcaaggatgggaaaggatgccattactcccaatatcgcaggaggtgtacatgccctgtgatattgttcctaatatccagggaggtagaggatgatattactttcaatattgcaggggctgtacaccctctatgatgttgttattaatatttaggttgggagaaaatgatatttttcctaatatcctgggaaggaaaggatgatattactgtaaatattccagggagtgtacaccttcctaatattctaatattgttcctaatatccaggggtgggagaggattatattactcccaatatcgcagtgggtgtacacccctcctgtgatgttgtttctaatatccaagcgaggagaaaatgatatcactctcaataccgcagggggtgtacaccttccccatcatatcgttcctaatattcagagggaaagaagatgatgttactttcaatatcgcaggggttgtacacaacccctgtgatatttctcctaatatccaggaagaaagaggatgatattgctcccattatagcagacggtatacgcctccctgtaacattgtttctaatatcaagactgggagaggatgatatcacttccagtatcgcaaggggtgtacacctcccccgtgatattgttactaatatccagggggaagaggataatattactttcaatattgcaggggctgtacacccccgtgatattgttgttaatatttaggttgggagaaaatgatattagtccaaatatcgcagagagtgtacacacttccgataatattgttcttaatatccatgggggagacgatgatattacacccaatatcgcagggggtgtagtctccccttgtgatattgtccctaatattcagggaagtaaacgatgatgttagtgtgaatattccagggagtgtacaccccctttgtgatattgtcctaatatccgcaggagagaagataatattactcccaatatcgcagggggtgaacacaccccctgtgatattgtttctaatatccaagcgaggagaaaataatattactcccaatgtctcaggggatatacaccttccctatgatattgtttctaatattcaggtggaaaacgggtgatattactcctaatatccaggaagaaaggggattatgttactccccttatagcagggggtatacacctcccctgtaatattgttcctaatatcaaggctgggatatacgtggggggaaggatgatattactcccaatatcacaggggttataaaaccttctgtgatattgctcctaataaccatggcggaagaagatgatattactcctaatattgcaggaggtgtacactcccccattatgttgttcctagtatgcagaaaaggagaggatgacattattgccaatatcgcagggtgtgtacaccacccatgatattgttcctaatatttagagggacagaggatgatattactcccaatatcgcagggggtgtacacgcatcccctgtgatattgttcttgaaatcgaggggaaagagaattatatttctctaaatattgcagagggtgtacaccgccccctgtgatattgttcctaatagccgggggcggggggagataattaaattactttcaatatctcagagagtgtacatcccccttgtgacattgttcctaatatccagagcaaaagagaatgatattcctcccagtatcgcaggaagtgtacatttaacctgtaatattgtttctaatatccagggggaagagaatagtaatactcccaatatcgtaggggttgtacaccttttctgtgatattgttgcaaatatttagaagagagagagaatattactcgcaatatcacagggaatgtatacttcccctgtgatattgttctaatatctagaaaaagagaggataatattactcctaatattgcagggggtgtacacccccacttgtgatattgttcctaatataaaggaaggtcgaaaaacaaacggggagcccagggggaaggaaggcaggcgaggaagaggcagcgccggggcgccggagggagcagccgggccgcggaagcgcgagcacgagaccggtcgcggtcgcagtcgcatttttgccgttgtcgcggccgccgccgccgaggcttacccggggatgtctgagcccgcgcctcgcggcccccaagctccacgctgcgcccgctgtcccggcctctaagggccgccacgtccctgcggcgcgcgcaggcagaaagcggcttcgtgccggcggagggggcccgggcgggccgggaaaggctgccccaggccccgcgcctaccccatcaccgcggccggcgccgggccgggaggatgagcggtgtggggctctgaagcatggagggggttttgtacaagtggaccaactatctcacaggttggcagcctcgttggtttgttttagataatggaatcttatcctattatgattcacaagatgatgtttgcaaagggagcaaaggaagcataaagatggcagtttgtgaaattaaaggtgacagctttggaggggaccacccttgattggatacataaattctgttcattcagcagacaacacaagaatggaattaatcattcctggagagcagcatttctacatgaaggcagtgaacgcagctgaaagacagaggtggctggtcgctctggggagctccaaagcatgtttgactgatacaaggactaaaaacgaaaaagaaagaagtgaaaccagtgaatcgctgaaaaccaaaatgtctgaacttcgcctctactgtgacctcttaatgcagcaagttcatacgatacaggaatttgttcaccacgatgagaatcattcatctcctagtgcagagaacatcaatgaagcctcttctctgcttagtgccacgtgtaacacgttcatcacaacgcttgaggaatgtgtgaagatagccaatgccaggtttaaacctgagatgtttcaacggcaccatccggatcccttagtttctcctgtgtcaccttctcctgttcaaatgaggaagcgttctgtcagccaccctggttcttgcaccagggaggagtagccactgtataaaagaaccagtatctgcacttcaccgactctcccagcgacgccgaagaacctactcagatacagattcttgtagtgatattcctcttgaagacccagatagacctgttcactgttcaaaaaatacacttaatggagatttggcatcagcaaccattcctgaagaaagcagacttatggccaaaaaacaatctgaatcagaagatactcttccatccttctcttcctgaagaaactgtagtgtccaactttctctaagtattgctatgcaaaagctgctgtaattgaactattgttatagggagtagttttttcccttaggactctgcactttatagaatattgtaaaacagacaaacaagaaaacaaaccacatacttttgaagcgtgttttatctttatatagtttgtttgcaagagtattttcctaataacttcacagtatgaatgtgcatcttttttttctttttttaacaaatgatggtgtaacattttgacatccataaggacaaatgtagatatttttctaaaaaaccgtgaggggactgacagcttggtcagggtgtattgtagcttataaacatgaaatcttacaaggtttcagtttgacagaagtgtgatatatgtaacttgtgccatggaccaaatggtcactttaccacagctaaaaatgagttatgatagcagcttgatggtgattgcattgtattcctttaatcaaaaaggaaacgcaatattctaagtatctttagcccaaataccatgacatattgagcatctttaaataaccagactgtattgtccttcatatgtgaagttgacactactgatttgtcaataccaaattttgggttaaagtgtttaatttttatttatttattttcttgttgcctcaaaagatgattgcattctaacttttgtgacctaccaaatttaagatgtgtatacattgttctttacgttgttctagaaaagagattttaatgctgtagtgacttagctcacttacatcagagaaataaacaactttcaatggaaaaaaatatatataaaggaaggaagaggatgatattacttctcatatagaaggggttgtacaccccccttgtgatattgttcctaatattcagggagggagaggattatattactcccaatatagcagggagtgtacacccccccccccgtgataatgttcctaatattcagggaagcagaggatgatattactttcaatatcacagggggtgtgctgtccccctgttatattgttcttaatattcaggggggagaggatattattatgcccgatatcacaggagaagtacaccccacaagtgatattgttcctaatatccaggggtaaagaggatgatatcgcaggtggtgtacacccctccccgtgatattgtttctaatataaagaaggagagagcatgatattactcccaatatcgctggaggtctacaccccccttgtgatactgttcctaatatccaggaagggaaacaatgatattgctgtgaatattccagggggtgtacacccctttgtaatattgttcctcatatccagggggtagagaggatgatattactcccaatatcgcagggggtgcacggccccactgtgatattgtttttcatatccaggaggggagaggatgacattactctcaatatggcagggggcgaacaccccctgtgatattgtgctagttaggttgggagaaaatgatattactcccaatatcgcagggggtgtacaccgctcctgtgatattgttcctaatatccatgacgggagaggatattactcccaatatcgcagggggtgtacctctcccctgtgggattgttcacagtatccaaaagggaagaggatgatgttactcccaatatcacagggagtgtacaccaccattgtgatattgttcctaatagccagggaagaaaacgatgatattattgtgaatattacagggggtgtacacaccccctgtgatatggtttttaatatacaggttggaaaaggatgatattactcccaatatcacaaaaggtgtacacacccccccatgatattgttcttaatacttcggtggggagaaaatgatattagtctccatatcacaggggtgtgaactcctccggtgatattgtttttaatatcaagaggggaggagatgatattgctttcaatatcgctgggggtgtacatccctcctgtgatattgttccttatatccaggcgaggggaaaataatattactcccaatagtacacaccccatgtggtattgttcctaatactcagggggaaagaagataatattactttcaatatcacagggtttgtacacctttcctgtggtatagttttcaatatccagggggaaggtacatgatattactcccattgcagcaaggggtgtacacacctcctgtgatattgttcctaatatccagaagtggtgaggatgatattactcccagggggtgtacaccccacctatgatattgtttctaatatccaggggaaaagagtgtgatattatgcccaatatcgcagagggtgtacacttatcctgggatattgtttctagtatttggggagggaggagaggatgctattattctcaatatcgcagaaattgtacacccccgctgtgatattcttcataataatcagggaaaaagaggatgatattactaccaatattgcagggggttacacttcccctttggtagtgttcctaatatccaggaagaaagaggatgatattaatcccattttccaggaagtgtacacccaccgtgtcatgttgttcctaatatccagcagggaagaggatgatattactcccaatatcggagagggtgtacacttcccctgttatattgtttctaatacccagggggaagaaggatgacattactgccaatatcacagggtgtgtaccccaccctgctattgttcctaatattcaaaaggaaagatgaaaatattactcccaatatctcagggtgtgtacacctctcctgtgatatcgttcctaatatccacaggaagagagaatattactctcaatattgcaggggggtgtacacccccctgtgatattgttccaaatattcgggcggggagaggatgatattagtcccaatatcgcagggggtgtgcaccaacctgtgatattgttcctaatatccatgcgggggaggacgatatcactctcaatgtcgcaggaagtgtacacctctcttgttatatttttcttaatatccaggagggaaaagatgatattactgccaatatcgcagggtgtgtccaccccccttttatattgttcctaatatccaatggaaaagaggatgacattgctctccatatcccagaaggtgtacaacgcccctgtaatattgttcctaatattttgggggaagagaggatgatataacttataatatcacaggaggtgtacaccacccctatgtattgttcctaatatcctttaagggagaggatgatattactcccaatatctcaggtggtgcctattccccctgtgatattgtttttaatatccaggggaagagagtatgatattacgcccaatatcgcagggggcatacaccctctctgagatattgttcataatatatagagggagagaggatgatattacttccaatatcagaggtggggtacaccccccggttatattattcttgatatccaggaggggagaggttgatattactggatatatagcagggagtgttcacatcttctgtgatactgttcctaatatccagaaaagtagaggatgatattactcccaatatcgcagaacgtgtacacctccctgtgatattgatcctaacattcaaaggggagaggatgatattactcaaaacatcacagggcatgtacactcccctgtgatattgttcctagtatccagaagggagcaagataatattactttcaatatcgcagggggtgtacacccctctttggtatgtttcctaatatccagaaggaaagagggtgctattactttccatattgcaaggggtgtacacccccctgtggtatggttcataatatccagggagggaaagggtgctattattccccatatcgcgaggcatgtacaccctgctgcggtacggttcctaatatccagggggaaagaggatgctattacttcccatatcgcggggtgtgtacacccccgtgtggtatgttttgtaatctccgggaacgaagagggtgttattacccctcatatcgctggaaatgtacactcccctgtggtacggttcacaatatccaggggattgagggtgctattactccccatatcgcggggggagtgcacctccctgtggtatggttcgaaatatccagggtaagagagggtgctattattccccattttgcaggaggcgtacacccctctatggtatgttttgtaatatcccaggtaaggggtgctattgagagaagagagcaaaagaccccccccatattgttctgtattattttatactcagtacctgttttaagaagaaacaaggaagcgaaaccaaaggcaggcagcccggcgccaggcaccagatccaaaaccagacccgaaaccaggcctgggccttcctgaccttagcctgaaagttaaaattcaacccatgacctagcaactgatgttatccatagattccagacattgtatggaaggacattgtgaaatttcttgttctgttctgtttcactctgagtactggtgcatgcagcccttgtcacatacccactagattgctcaatcaatcatggccctttcatgtaaaaaccttagtgttgtgagcccttaaaaaggacagaaattgtgcactcaacaagcttggattttgatactctagtctgctgatgcttccagctgattaaaagccacttccttcactacctcggtgtctgtgggattttgtccgcggctcctcctgctacactgtgactccccttatagagaggggtgtacacccccctttggttcctaatatccagcgggggagtaggtgctattactccccatattgcggggagtgtacacccccttgtagtacggatcgtaaaatcaaggagggagagaaggtgtaattatccccatatcacagggagtgtacacccctttgtggtatagtttgtaatatccacgacgggagagaatgctattactccccatatcgtggagggtgtacaccgccctgtagtatggttcgtaatatccggaaggggagaggttgctattactccccatatggtgggaagtgtacacccccatgtgatatggttcataatatccaggggggtagaggatgatattacccacaatatcatagaaggtgcacacccttttgtgatattgtccataaaatccagaaggggagaggatgatattacttccaatatcacagggggtgtgtagccccatatgatattgtttgtaatatcaaggtagggagaggatgctattccttacaatagctcaaggggtgtaaccttcttgtgatattgtttgtaatatccagaaggggagaagataatttttttattttaaaagtaaactttaatgtcaaaaatgcaaacttgagaagggcagaaagatcaaacagaaggctgccacttcacaattggagggttgcacagtggccgggcagaggcgctcctcactccccagacggtgaggcagccgggcagaggtgctcctcacttccgagatgttgcaggagccgggcagaggtgctcctcacttcccagaacagggggctgccgggcagaggtgctcctcactgcccagacggtttgcaggcctggcagaggcactcctcacttcccaaacggagcagcggcaagccagaggcgctccacacttcccagatggtggggcagccgggcagaggcgatcctcacttctcagagggtagggcggcccagcagaggcgctcctcacttcccacatggtggggcggcaggctagaggcgatcctcacttcccagacggtggtgtggccatgcagaggtgctcctcacttcccagatggtgtggccgccgagctgaggcactcctcacttccctgacagtggggcggctgggcagaggcgctcctcacttcccagacacttggactccgggcagagactctcctcatttcccagatggtggggctgccgggcagaggcgctcctcacttcccagacggttcagaggccgggcagaggcgctctggggagaggataatgttactcccaatatcgcagggggtgcacactccctgtgatattgttccgaatatccagagggggaaaggatgatatagctcccaaaatcgtggggagtgtacacccccctgtgatcttgtttgtaataccaagaagaaaagagaatgctattatttccaatatagcagggggagtacaaccccctgtgatattgttcgtaatatctagggggagagaaaattatattagtcttaatatctcaggggacgttcatccccctgtaatattgttggtaatattcagaatggagaagatgatattgttcttaaaatacaggaaaaaatatgataatattacttccaatatcgaagggggtgtacactctcctgtgatattgttcccaatatccagaatgaaagaggatgctattactcccaatatcccagggagtgtacacccctttgccatattgttcataatatccaggggaagacaggataacattactcccaatatcaccgggggtgtccacccactagtgatatttattgttcatcatatccagaaaaggagaggatgatattactcccaatattgcaggtggtgtacggtccctgtgatattctttgaaatatctagaaaaggagaggatgatatcactccgagtatcacagggggtgtacacccccctgtgatattgttcgtaatatccaggggagaaaaggatgatataattgccaatatttcaggggatgtgcacctccctgtgatattgtttgtaatatccaggggtggagaggatgatattactcaaaataacgtaaacatcctgtgtgtacatcccctgtgatattgtttataatatccaggggggtagaagatgacattacccccaatatcacagagtgtacacacccctgggatactgttcataatatccaggcgggaaagaatgaactacttccaatatcgcaggatatgtacacccccctgtgatatatttcctaatatttatgtgggtaaggatattacccccaatatcacagaaggtgtacatcctctttgtgatattattcctaacatccaggaaaggagagaatgatattactcccagtatcgcagggggtgtacaccacccctgtgatattgttgctaatatccagggggagaggataatattactcccaaaatcacaggggacgtacactcctcctgagatattgttcctaatattcatggggaaaagaatgctactactccaaatacagcagagggtgtacaccatccccgtgatattgttttttatatccaaagggtgaaaggctgatattactcccaatatcgcagggggtgtacaggccccccatgatatcattcttaatatccagggaggcaaagaatgatgttactcccaatattgcaggctgtatacaccccccgtgatattgttcctaatatccagagtaagagaggatgacattgctcccaatattgcaggggttgcacgcacgccctgtgataatattactcccaatatcaacagtgggtgtacactcctcctgtgatattgtttgttatatctaagaaagaagaggatgatattactgtcaatatcacagaaggtgtacagccccttgtgatgttgtttctaatatccagcggtgagaggatggtattactcgcaatattgtagggggtgtccaacggccctgtgatattgtttctcatattcaaaaaggaaaagaataatataactccaaatatcgcagggtgtgtacacttccctgtgatattgatcctaatatccaggaagagagaggatgatattaatcccaatatcacagggggtgtacatcgcttctgtgatattcttcctaatatccagggggggaggggatgctattactcttaaaatcgcagggaacttacactcccactatgatatttttcctaatatccaggaagggagaaaatgatattactcctaatatcacatatcacaatgggtgtacatctccccgtgatattgtttctaatatcaaggatgggagaaaattatattactctcaatatcgcagggggtgtgcacacctcctgtgatattgttcctagtatccagcggaggagatgatattactttaaatattgtagaaggtgtacaacccccctttgatattgttcctaatatccagggggaaaggagatgatattactcctaatatcgcaggggctgtacaaccctatgtgatattgtttcttctaatatccaggggtggagaagataatattactcctaaaatcgaaggggacatacactccccctgtgatatttttcctaatatccagaaggaaagaggatgatattactcctaatattacaagaaatgtatacctgtcctgtgatattgttcctaatatccagaggggtaaatgattatattactcccaatatcgcaggggtgtacaccttccctgagatattgtttctaatatgcagtggaggagaggatggtattactcccaacatcacaggagatgtaaactccccttgtgatattcttcctaatgttcaggacgaaggagggtaatattactcactgtattgcagcagggggtgtagagccccctgtgatattgtttttaatattcaaggttggagaaaataatattccttccaatatcgcatggggtgtacacccttctttttatatagtttctaatatctggggggagaggatgatattactcccaatatcgcagggggattacacccccactgtgatattgtttttaatatccagggtgggagaggataatattactccaaatatcccagggctatacaccctccgtgtgatattgtttctaatatccagaggaagagaagatgatattactcccaatgtcacagggtgtgtacaggccttctttgatattgttcttaatatccatgagggagaggatgatattactcccaatatcgcaaagactgtacaccctttctgtgatattgcttccaatatccagggagggagaggatattacactcaggatcacagggggtgtacaccccaacctgtgatattgtttctaatatctagggaaaatgagggtgatattactatcaatatcacaggaggtgtacactcccttatgatattgttcctaatatccaggagaatgacaggataatattactcccaatatcgcgggtggtgtctccccccactccgtgatattgttcctaatacccagagggggagagaatcatattactcccaatatcgcaggggatgtacacctacatccggcggagtagaagataatattactcacaatatcgcaagaagtgttcaccttccctgttatattgttgctaatatccagggagtgagaagatgatattactttcaatactgagcgtgtacactacccctgtgatattgtttctcatatccagtagaggagaaaatcatgttactcccaatattgcaggggtgaacacctcctttgtgatatttttcctaatatcaggaaagggagagtatgatattacccttaatattgacaggggtgtacacccccctttgatattgttccaatatccaggggggcagaggataatattattcccaatatcgcagagggtgtacaccccccgtgatattgttcctaatatccagagaaataaaaaatagtattatttccaatatcacagggcgtacattttccctgtaattttgttcctaatatctggggggtggggtggcaggataatattactctcaatattggagagggtgtacacccccctgtgatattgttcctaatattcagggtgggagagaatgatgttactcccaatatctcaggagtcgtatacacccccttgtgatattttttctaatatccaggaggcagaggatgatattgctcccaatatcgcagggggtatacacccgagctgtgatattgtttctaatatgcaatatgggggaaggatgattttactttcaatatcgcagggaatgtacactttccttgtgattttgttcctaatatccaggggtggagaagatgctattactatattactcctcatatcgcaggcggtgtacaactccctgtgatatggttcagaatatccagagtgaaaaaggagggtgacattactcccaatatcgggggggtgtacacccctttgtgatgtggttggtaatatccaggggggcagatgagggtgatatcactccccatatcgtggaaggcgtccacttttttgtgatgtggttctttatatcccgaggggagaaggtgatattactccccatatcgcgaagggcatacacccccctgtgatatagctcataatattccggagagtggaggaagatactatgccctatatcgcgggtggcctacaaccccctatggtttggcttataatatccaggggggagagggtaatattgctccccatattgtggagacgtacagccccctgtgatatggtttgtaatatctttggggggcgagggtgatattactccccatatcgcggggagcatacacccccgtgatctggttcatagtatctcaaaggaagaagttgatgtgtacaacttaagggaaaaagttgaagtgaagtgtacacacgccctgtgacgtggttcataatatccaggcgggggagaggagagtgatatttactccccatatcgcgggtgttgtaaactcccctgtgatatagttcataatatccaggggagagaggagggtgatattgctcctcatatcgcgaagggtgtacaaccccctgtgatatggttcataatatccagaagggtagaggacgatgatattactccacatatcttgggaggtgtgatatggttcgtaatatccagcgatgagagaatgatattactccccatatcgcaaaaggtgtgatagggtttgtaatatcctgagggggagagggtgatattaatccctatattgcagaaggactacaccctcccatgacatggtttgtaatatcccagggggtagagtgtgatattactttccatatcacagggggtgtgatatgattcgtaatattcgaagggggagagggtgacactactctccatatcacggggtgtgtgatatggttcttaatatcccaggggttagaggttgatattaccccctttttggggggtgtgtacaccccctgtgatatggttcgtaatatcccgggggagacagggtgacattattccccatatcgaggggatcgtacaccccctgtggtgtggttcataatatccctagggggagatggtgatattactccccatatcagggggcgtgcactcttctgtggtataattagtaatatccagggggcagaggtcgatattcgtttccatatcatgaagggagtacacttccctgtgatatggttcctaatatccaggggggagagggtgatattattccccatattgcggggggacatacaacccctgtgatatggttcataataaccagaaaagaagagggtgatattaatccccgtattgcagagggcatacaccccccctgtgatatggtttgtaatatctaggggaggaaaaggtgatattactttccatattgctgggtgcagacacccctttatgatatggttcataatatccaagttggagagggtgatattacttcccatatcatgggaggtatacccttccctgtgatatggttcgtaatatccagaaggggagagattgatattactccccatattgtggggggcgtacaccttcctgtgatacggtttgtaatatctaggggatatagtgggtgatattactcaccatatcacgggggttgtaacatggtttgtaatatccaggggaggagagggtaatgttactccccatatctcggggcatgtacaccctcctgtgacatggttcgtaatatccaggtcgggagagggtgatattactcctcatattgccgggggtgtgttatggttcataatatcctggggaaggaggctgctatcactctccacatcttgggggatgtacactctcctgtgatatggttcataatatccagggtgggtgagggtaatattactccccatatcgcgggaagtgtacatacccctgtaatattgtttgtaatagaagagagggtgatattactccccacatcgcgggtggtgcccacccccctgtgatatggtttggaatatccagggggatgaggagggtgatattactccccatatctcggtgggagtacatccctctttgatcaagttcataatatccaaaaggaaacaggagagtgatattactccccatatcgccgggggtgtacacgggagggggagtacacccccggcgatatggtctgtaatatccagggaaggagaggagggtgatattactcaccatatcgcaggtggtctacatttacctgtgaaacagtttgtaatatccagggggggaaatgagaatgattttttttttttgagtctcactgtgtcacccaggttggagtgcagtggcacgatcttggctcactgcaacccccgcctcctggactcaagcaattctcctctcccagcctcctgaatagctgggactacaggcgcaccccacaacgtctggctaatttttgtatttttattagagacggggtttcaccatattggccaggctgatctcgaactcctgaccctgtgatccatccgcctcggcctccaaaagtgctgagattacagatgtgagccaccacgcatggcccaaggagaacgatattactccccatatcccagggggtgtatatccccctgtgatatggttcagaatatccggaaggaaagacagggatattacttcccatatcgcaaggggtgtgacatggttcgtaatatcccatgggggagagggtaatattactcttcgtattgtgaagggcatacactcccctgtgatacagttcataatattccggggagtagaggaagatattatgctccatatcgcgggtggcataagccccctgtggtttggttcataatatccagggaggagagggtaatattactccccatattgtggggacgtacaccctcctgtgatatggtttgtaatatcccagaggggagagagtgatattactccccatattgcagggacatacacccccctgtgatatggttcaaaatgtcttttttttttgaaggactggttctttatttcaaaaagacacttgtcaatattcattatcaaaacagttgcactattgatttctctttctcccaatcggccccaagtagaccacatcaaaggagagtacatattaagccaataagctgtaggatgtacacctaacagacctcctagaaaccttaccagaaaatggggacagggtagggaaagaaactttaaaagatcaacaaactgccagcccacggactgcaggggctgtcacagccagatggggtggccagggtgccacaaacccaaagaagcaaagtttcaaaataatataaaatttaaaaagttttgtacataagctattcaagatttctccagcactgactgatacaaagcacaatgagatggcacttgtagagacagcagcttcaaactcagaaaagggtaatgagatgagtttcacatggctaaatcagtggcaaaaacacaatcttctttctttctttctttctttcaaggaggcaagaaaagcaattaagtgctcacctcaacataaggggaacatgatccattctgtaagcagttgggagggggtagagatggaacaaaattttggtctcagaggtcttgccatcttaatttggtcacttctaatgaaaaaaataaaaaatagaaataacattatccaaaggtatcttaaagctgaaaacttgaacagcacattttttgttgttgttgtttggctaactcctcctggaaccacctttctggcttagctagtactttgtacagagcaatgaggcttcccatagtggagtctccctgggctctgtttggctctcagcaaggcaggcctataccttttcctctcctccatggagagaggaatatgcattaaggtgaaaaatcaccttccaaaagtgagaaagggattcgatcgctgcttcagggctgtggtattatatggaatgttttacaaaaggttgctacaaaacaacaaaagaggtaattacaaaatgtgtacatcacaacatactttttaaagacattatgcattgtgctcacattcccttaaatgttgtttccaaaggtgctcagcctctagcccagctggaatctccgggaagaggcggacagtttggtgaaaaagacacagggaaggagcgggcggcggaaggagggggcggcgaaaggagaaagcagccttccagttaaagatcagccctcaattaaaggtcagcttcgggcaggctggcctcaggcggagtctggttcagagggaggagcagcagcagggtgagactgaggcgttctacatctcattcaggtcaagcagagtctggtccagcatcctttgtgtacagaggtgctcccctttggtgcatttcagtttatcttccaagtcatcaattgtcttttccagcttggctaccgatctctcagcaaactcagcatgggtctccgcctcctttattttatcagtaagaatcttgatctcttcctcatatttgtcttctttttgagagtacttttcttcagcagcactcagacacttcaggttctggtccatcagtctaatctgctcatccatctctcggcaaagggattctgccagctcagctcgttcctctgtgcgttccaagtctccttcaatgatcaccaacttacgagccacctcttcatacttcctatctgcctcttctgcaatgtgcttagcttctctgagttggatttcctggagttccatcttttcttcatcttttaaggcccggttttcaataaccttcttacctctctcactctcatcagcagctttttccgcttcttccagcttttgcagggcagtagccaggtgctcctgagcacggtccagctcctcttcaaccagctggatcccacgttcaaggaggccacctcagcctcagcctgttcccgggcccacctttctccctcaacttctcgctggaggcgctcagctcgctcctctgcatcatctgcctgctgctgcagaacctggatcttgcgcttcaccgcctcgatggtggtgatcccagccatggtgcccacccagctactgctagagctccggttcctgcctcctccgatcggcgttgcagcctcctctcacccttacttccgcctcggttcaaaatatcttaagggaaggagttgatattactccccacatcacgggaagtttacatcccctggtgatatggtttgtaatatcccagggtggatagggtgatattactctccatatcgcgaaggagtactcccccctgtgatatggttcataatatccttggggggagagtgtgatattactccccatatcgcgagggccatatactcctttgtgacatggttcgaaatatcccggtgggggagggggtagagggtaatattactccccatacagcgaagagcatacgcccttctgtggcaaggttagtaatacttcagggaaaagagtgcaatattacttttcatattgcagggaacatacactcccctgtgacatggttcgtaatatcccgggggctgagagggtgatatttctccccatatcaccgggggcctacacctgggtgtgatatggctcataatatacagggagggagagggtgatattactccacataccgagtgaggggttacacaccctcgtgacatgttcgaaataccccaaggaggagacaatgatattactttccctgtcgcgggggctacaccctcccagtgatatggttcacaatatcccggggtggagagggtgatattactccctatatcaccggggggtgtacacttccctgggaaatggtttacagtatccccggggggagagggtactattactccccatatcacgttacatatcagggtacacccccacgtgatatggtttgtaacatcccaggaggaagaaaatgatattactccccatatcgcggtggcatacacccctccccgttaaatggttcataatatcttggggtggagagggtgatattactccccatatcacgtggggcatacaccccactatgatatggttcataatatcccggaggggagagggagatattactctccatgtcgcggggggcatatacacccctgtgatatggtttgtgatatcccgggggcggagagggagatattactctccatatcgtggggtcgtacacttttctgtgatatgattcgtaatatccagacggggagagggtgatattacttcccatattgcgggggcgtacacccctctgtgatatggttcataatatcccgaagaaaagagggtgatattactcctcatatcgcggggaacacacaccaccctgtgatatggtttgtaatattcagcgggggagagagtaatattactccctgtatctcggatggcgtacactcccctgtgatatggttcataatatccagaagaaaagagggtgatattactccccatattccagggaatgtacaccaccctttgaatatggttcgtaatatccaggaggggagagggtaatattgctcccaatatcgaaggaggtgttatacggttagtaatatccagagaaggagagggtgacattactccccacatcgtggtgggtgtgcacccacctgtgatatggttcataatattcaggttaagagaggtgatattgctttccatatcgccaagggtgtacactcccgtgaaatacagttcgtaatatccaaaaggggagagggtgatattactcccatatcgtggggggtgtacacccctctgtgatatggttcataatatccagggtggaataaggtggtattactccctgtatctcggggcatgtacatcgcctgtgatatgattcataatatccagaagaagagagggtgatattaatctccatattgctgggggtgtacaaccccctgttgtatggtttgttacactgagttggggagagggttacattactctcaatatcgagtggggcatacacacttatgtgatatggttcataatatcccagggaggagagggtgatattactccccatatcgcgggaggcatacaccccaatgtgatatggtttgtaatatctacatttttttttttgagacgaagtctcgctcttgtcccccaggctggagtatgatggccggatctcggctcactgcaacctcagcctcccgggttcaagcgattctcctgccttggtcccccaagaagttgggattacaggcgcacaccaccacgcccggctactttttgtatttttagtagagaaggggtttcaccatgttggccaggctggtctagaactcctgacctcagatgatccacctgcctcggcctcccaaagtgctgggattacaggcgtgagccactgcacctggcctggtttgtaatatctatgaagggggaaggtgatattactttccatatcacgggaggcgtacaccacgatgtgatatggtttgtaatatccagggggtatactgggtgatattactccccatatcgcggggagtgtatacccttttgtgatatggttcctaatattaagctgaggagaaggtaatattactccccatatcgcaggggtttttatatggttcataatattcaggaagagagagggtgacattactctccatatcacggggtgtgtactcccccatgtgatatggtttgtaatatccagggaaggagaggttaatattactccccatatcgcagggggtgtacacctctctgtggtttgtaatatccaaagggaagaggatgatattatcttcaatatcttggggggatacagtccccagtgatattgttcataatatccagagggggaggggatgatattactcccaatattgcaggtggtgtacaaccccctgtgatattctttataatatagagggggatgatgatattactcccaatatagtaaacaacctgtgtgtacaccccctgtgatattgtttataatatccaagggtggaaaggatgatattactcctcatatcgcagggggtgtatacccctctgtgacattgttcctaatattcaggggaggagaagatgatactactcctcatatcacaggggatgtacacccccctgtgatacttttggtaatatccaggggaggagaaaattatattattccccatgtcacagagggtgtacaccccgctgtgatagtgttcataatatccaggtgaaaagaggatgatattactccgaatatctcaggaagtgtacacccttctgtgatattgttcataatatccaaaggtggagaggaggatactactccccatatcgcagtgggtgtacacccccctgtgatatggttcataatatccaatgtaggagaggatgatattactttccatatcgcggagagtgtacatccccctgttatattgtttgtaatattcagggagaaagaggatactactactccccatatcacacggggtgtatattcccctgtgatatggttcctgatatccaagagatattataatcctctcttggattatgctacctctcatatcgcatggggtgtacacacactttgtgatatcgtttgtcatatccaaggagggagaggattatattaatcccaagatcacggggggtgtacaccctcctgtgatattgtttgtaatattaaggggggagaggataatattactcccaatataattaacaccctgtgtgtactcctccttgtaatattgttcataatatccaatgggggagacgatgatattactttcaatatcgcagaggatgtacatccctttgtaacaatgtttgtaatataaaaggcaagagaggatgatactacttccaaaattgcaggacatgtacaccccccggtgatattgttcctaatatccagtggggaagaggatgatagtagtcccaatatcgcaaagggtgtacacaccccctgggatattgttcctaatataaaaggaggagaggatgctattattcccaatatcacagaaggtgtaaaatcccctgtgatattgttcgtaatattcaggaggggagaggattatattactcccaatatcacagggtgtgtacacagggaggggcaagggccagaagcgggcgggaatccccatgtttgggcggacccagtttctaatggccagcatttgccaatcaaagcttaccagagaactctaaaagccagggctttcctgctagacaagactcatttctggaactgctttaaaaagaaacaaaacttcccaaggaccccttttcctctctgtctgcctaaaataatgttttaaaaactcctaaagcagctgaattcagcccccttcctgggggaatgtatagacggaactcccacctttcccggcatcccaaggccagagtatgtgaaactcctgggtctctatgtgtgtctgagcggctgctctgccaacactccacacagccctgtgtcctggacccaaggcccttatgacctgagctcaagaggggatctcctgatccatgggttgcaaagatccatgggagaagcatggtttctggggcggggtcacacgctcagtcactgtttccctcggatgccggagatggttcctttggctctctgccaatacagggtgaatcatcatccatccctcttttctttgttctcccgggtcaagttgtttgcctagtcagtcccaatgtgagaacctgaatatttcagttgacgcgctgacttcaaaatccccgggcttcgggaggcggagcttgcagtgagccgagatcccgccactgcactccagcctgggcgacagagcgagactccgtctcaaaaaaaaaaaaaaaaaaaaaaaaaaaaaagtccccgggcttttcttttcactcagtggaaggcagctgcttctaattggccatcttggcccgcccccaccacgtgaccttctgtaaaatgcctccactctccaggaacgctctcattatataactttgcctgaaaccaacagcacgctcattgcacatatcatgggctcatttatttcacttataaagaacctggccaaggaagagatagtgcctaaagtggccagtattctgaccgatatgttagaaaaatggtgtgccgaccaattcatgacatgtgtcccaaaactagcaacggaaattgtattcgccgtgttgaggtctctaatccagatgatgctcatctatgtactggaaaaggcagagtcctttcctgacaagctgctgaaactcttcagaaacatctcatatttcctgaagaagatgatgtctggacaagcagcacaggtcgttcagatttaactttctattcatatatccagcacgatattcgcacaattgtcacgaaaccttaccagttgatgagtcctgcacatttcctttaatttcaggaggaagagggtaatccggatgagttttctgacctactctgctgctgtgattaaacaaccaccaggaaattttgacgacactgttctcctgagctcctccctttcctccgggaacaaaacaattgaatttacaaaaataaagtgttatttgactggagtgaggtctcatgtctgcttatgcggtggctcgctgctcagaacagggtgagtctctgggttgtgtgctgaggaggggaggctctcaatctggagaaaacccactgcaggggacacctccatggggtctgagggactgaggatgaggagccggactgggtctagggaaggaggaggtttcagagggtgaaattctggcactaaagcctgggggtgtttgggaacttcctccttccgaagaagtttcagggagggataaagacaaaccctgggctccttgaggggcccttactaatttgagaggactctatcgggaaggagagtgacaatggcctccttgaggactgaggcccctgaataaatgaggcccagatacagtccatgggggatgagaccttcaagggtcacattttggttgggacagaggaaaagtgcagctctgcagccgcagaggaaaacccggcagtgtgaaagcgaccttggaggggccctgtgcgctctgaatgcgtctgagcccccatcccctgtccccgcctctctttctggattcttccagctcggctgtctccgccatcttctgagcgctccaccctgacttattcaagtttcccttctgccttccaagtactccaaaatctttcagatctgtgtccctacccctgtttttagcatgtgttggggctccaggtccctgaaggtttctggcctgaaatccacctccccagcggagtggactgcgttctagagactccacactccgcgaggttcccaggcccctgagggacaaccgagtggcctgcgcacttcagggctccacactcggcaaggtctttcaagcccttggggtccccttcttagttttttccacctttctgggctgcagtcactccataaatgctgggatctgatccccacccccactctcgtttcctcaattctgcgggctacacgctctggcaaggtcctccgggccctggatcccctccctctccctatgcccacgctcctagtcagcccttctggggtccactattttcaggaactaaccgttctcatggagccttgctaaccggaaagctgtgtggaagaaaggctttgaggatagaggtggagatttggctcttccatagtgccactcacccaccccaccatgctgccactgccagacccggacccctgtttcagaacaagtgaccagattcgctcctggacagccctggacactggccttttctctgaaaactactcaccctttctctagtccccacttcatgccagcctcataccctcttccttcccccacgctggcttccgggatcctcctctgctcagacaacctcttctgtgtcccacccccgtttttagaatgctttggggcaccaggttgggggaaggtttctggcctgatatccatctctttccaaactcccttcttcccttgaaaggcttcttgccttcagccccacttctggctccgaggtttcaggacaccctcctcttcatcctcattcttttgaccaccagctttttaggaattcgaacgtccctctcatcttcgtgaatcctgtccaggcatttgttgaccccttcatctgatacccctgacctcacattgccaaaagtctacccctacccagtacactggaattagacaaaatcccaggagttttacctcaactctgagtgtgcccacaggagctctccctgaagccacgtccttttaagcagggtctagggttcctcccttgtcttaatgaactctttgtcacacggaggacgttatggagcccttatgatctttcactgcctttctgcccagcgttttgtctttccatggacatttataatattttccatggacattttgttctctcaatgtccacccctaatttccaacatcccaaagattctcatgtgtttcctgaaagccatttacaggaatggctgtgcccagacccccttccccaggatcctccttcacacctggtaggtgcctctcctagagagatttgcactcagttgtcgtgcagtcacatggcccagatggttgttaatcacccccttcctggcaacagctagcagccagggaatcactggcacagaaacctcagggtgaccaagatgaggccacctctgtgctgaaggctgtgctccagagcctgcttgggatcaggcttaagcaggtcttcagccagacctgatgttacctggtttccttgagctgccctgcctgagctatcgggagcactccctcaatgcacatcttgattccctatctcatgctctgcttctagaaaccatgagctatcaattgctactggcaatggtcctgggaagtcaaccctaagtatggattctggggttggatgactccccacaggacttcagtgagcaacaatcactgctggcagttggaggacagagtcgctagggcatgtgaccactgtgaaaccaccgatgtttcacctggggtaattttggatgaactacggtagaagcactgaaggtacattgcttttggtttggaagattgtaggtaaataatagcgatatgaatgtggaattggatggctgcaaacgagtgccattgatgcattgaaagaggaaaagtcaggctgtcacctgtcactcagcaatttaaagtgtgagagttgggactagatgtggtggctcacatctataatccagagattcgggggaagcttgaagaggtaggatcttttgagtccaggagttccagaccagcctggacaccagagcaagacctcatctctacaacaaaattttcttaaaaattagatgggcttggtggcacgcacctgtacttgtagatctagctaatggggagcatgagataaaaaaatcacctgagtcagggacttaggggttacaatgaggtatgattgtgccagtgcacacactcccacctggccaacagagtgagattctgcttccaaaaaaataagaaataaatcaggtttgagagttggaaagcatcatcttctcctagagccaaaggacatgtacaactgagacccaggaacaaagcttcatcacaaagagaccatcatcagtggagccgggagatgcattccccctcaccctgccttgaggaggcagtggagtcatctgtctgggatcctttctgacccagccctatttgtttgtctctttggcttctttggatttgtatattttagctgttataacactgtaaaacaaacagagtgatttttttgagttgtgtgaatgatgctagctccatagtcaccctgagagtgatgggaacttttgaatttgtggcaagttggagggtagtgtaagtgacctgagattgccaaattggggctagcactggatgtgaggttaggctagtggaaaaatatgcccagaaccagaggagtgtgggctcactgcaggtggttaggctcagatccaaattgtacagatggatagctttggggtaaagaataacatagttgagaagtgcatgtgttagtctgttcatgcactgctataaagaattacctgagactgggtaattatttataaaactcaggtttaattgggtcatggttccacaggctgtacaaaaagtatgatgctggccatcagctcaacttctggggaggccccagaatagttagagtcatggcaaaaagtacaagggaagcaggctcatcttccacggccagagctggagcaagtggtaggagaggtgatacacactttcaaacaagtaggtcttttgagaactccatcaccggacagcacctatgggatggtgctaaattattcatgaaatatccgcctccataatccactcaactgtcaccagcgcagccagccccacctccaacagtggggattacaattccatatgaggtgtgggtggggacacagctccaacctcaatcagtgggcatcctggattgggtctactatagaaggagaaccaggagctgactatgatcttgaaccctacccatgatggccgggcggggtgactcatgcctgtaaccccagcactttgggaggctgaggtgggtggatcgcctgaagtcaggagttagagaccagcctggccaacatggtgaaaacctgtctctactaaaaatacaaaaaattagaccggcgttgtgctggatgcctgtaatcacaccactacgctccagcatgggaaaaaataccaaaacttcgtctcaaaaaaaaaaaaaaaaaaaaaaaaaaaaagactgcccatgaccactgcaccagtgagagggacaccagcatcactgagatgcaagggctggacattcttcataggtcagagctcaaagcaggggacactgatacagagatgggctccatccatagcaccaaagtggtgagaggatgtgggaatggcagaggccagcactttgccatcaatgcaagggggtataaggaggtgacaccagtgccagagtacatcacggggggactgccctacaatatctaggacttacctcttagagcgtgtttcattagcgacaacagatataaatggcagacaggtgtgtccctgcattaacaggaaatagaaatcatcaagaggaacagaaggcagatgtcagcagccccttagaaagtcatcatccttcatacagttaaaatctgagacagttctcacacgagaaggcctaactcaaaaagaggctgggttctcatgaggcaggtttatgcaaaaccaaggaaggtgtacaagtttggaattctccagtttcccttggaaaagacctacagtcatttgcttaggtaactgagcactgaacaaaggtgagtattgttgtcttttagaagctcttggccaagaaggccttgttggcataaaacccatggtttggaaacatcaccatgacccctgttagagtaatggcctaagggtgggggtcaggaaattgatgtattccttgccaacttctgcctctaagtgagtgaactctgtttgtgaacctctctcctctgtggttatgttcctaggctctcatgtataatcaggagtcatagacttagaaacaggaaaaatacttacagtgtttttgtggcctgtgagctatgacttataattttaggaaaaaaacaattgcaaatggaaagcctaagtctatcaatgctcatccaagacaacataatcaataaaaaccaatatcaaatctcaaggcaaattatttcctgtatatagatggcagagatgagcaccaccatcaaaaactcaaggaccagtgctgtgggtccagtcatctgtttcatggaattcaccagtctggtatcttcaaaatccagaaggatgatggcagatggcaggaaagtaatgcaaacgtcatcaggtgtgaccccactgtagcagctgtgatggatgttttctctcaccatagcaataaataacacaacctcggtcacactgtatgcattgttggtctgcaaaatccatgttttgcaaaactcttcaggaaggtggatctgtaatattggcattgacatgagaacaacagcagtatttattcacaatctcaagctctctgtcttcccgtctctctcattagccatccaagtagtcctgaggaaccaagcccatcagaacattctgcaacataatacacagctccattctccattcaaattttgttgttgttgttgttgttgatgagacaacatcttactccatcagccaggctgacgtacagtggggctatctgggctgactgtagtcttgagcttccaggctcaaggcatcctctcacctcagcctcctaagtggcttgaactacagacacacagcgacatgctgggctagtttttgtatattttgtagagacgtgctctcaccatgttattcaggctggactcaaactcctgagcgtaagtgatccaagcaccttggcctcaaagtgctgagattacaagcctgagccactgcacccagcccaatctccattctactgataacaatgtcattaccaggtctgatggacaggaaatggtaaggtttctgaaaacctaaggatcacacagcgagttccaaaggctgaaagtgcatacctgtcgacactgataccaatgacatccaatggtgagaatgacattccttgtagtcctagctctgctcataacaaatctatactgaagtgtaagagtttgatggtcatggggattttccatgtctctgcctttcagcgatgtgccatatctgtgaagtgttcagaaatgcaacagcctgaggcatgctgggcatatcctctaataaaaaggaaaatgccattttatggtcctgtatttctacaagttggaacacatgggcctgtgatccagatgggggaaatgggaatattcccactcattcaccttcatccacgaagcccatttgaaagctttgggcttcccatccttgtagattttagtgttgtgggctgggtgcagtggctttcacctgtactgccaacactttgggaggcctagacaggtgaatccactgaggccaaaagttcgagaccagcctggccaagatggtgaaaccccgtccctactaaaaatacaaaaattagcaaggtattggggccagcacctgtaatcccagctgctcgggaggctgaggctggagaatcgcttgaacccaaaaggcagagactgcagtgacccgatcctgcctttgcactccacctgggcaagcagaacaaaacttctgtcttgaaaaaaaaaacaaaaaacgaacaaaaaagatgttagagttctgggtttagaggtctataccccagaaagagaatggtttcaacaagggacaaagaagttgctttaaacgttgacttgccatttcttttcagtgtgtttgttctcttgcgtcaagagaccaccagaaaagtggtgcaattactctcctgtcaagaatcattgactatcatctgcaagagggtcagatcctggtatataattagggcagaaatacttagtctgagaagggtatgacatccagaggccctattaatgatgtccttttctccatgcctgactctgaccccatgtgctggactgcccctgtgtggatggcctcatggcctgctcggactctgaggtcccaccccaagtggcacctccatggagggctctactcttgtatgggctctgacactcacactgagacactctcccatggacacctcttcacccacttggggtctgaaactgggctactccatccctccctaacctggaacagagagctttcactgctattacacaagtcatagaggctaactcctcatttttccaagctaattattgaaacattagtcctgggttgataagacaagataagttaacttttcataaatttgcttatcaagttttgaataaattcaaataaattcaccttccccacacaccttagttgtcgacatcacacgcgcacccatactcacagggtgagcacgaaggcttcactgtcagtggagaaagtggcaaaacccttctgtgcctcatcctggtctagacctggccctcatcctttcccactcttcccctcactcccttggattcatccacactggcctcctgcctgctgctccacctccctgcgaagctcacccctgcctcagggcctttgcacgtgcagtggcttcaagccatatcctcttcacccagatctcccagatctcctgaatgatcttcttttatcattcaggtctcagcttgcatgtaatcttctcagtgaggattacccaaaccacatagttcattcattcattcaaatattcattcaatggcatattgacaaagcagctacttcatgccaggccttgggccaggtgttatggatatggcaacaaacaaaacaagagttttctgctctcaaatttttacccacttaaaggagatatcatacatcatctgtaaataaatacatcatctgtaaataatgatgtaaataaatacatcatctgtaaatctgtaaataatgatgtaaataaatacatcatctgtaaataaataaagtataataaaagaaaatagtaggtttttttggttggaggtgaccgtgaagtttgcaaataccatcttacaacacattattttattttatttcatttcatttttaattttattattattatactttaagttttagggtacatgtgcacaacgtgcagatttgttacatatgtatacatgtgtgaagttggtgtgctgcacccattaactcgtcatttagcattaggtatatctcctaatgctatccttcccccctcccccaccccacaacagtccccggtgtgtgatgttccccttcctgtgtccatgtgttctcattgttcagttcccccctatgagtgagaacatgcggtatttggttttttgtccttgtgatagtttgctgagaatgatggtttccagcttcatccatgtccctacaaaggacacgaactcatcattttttatggctgcatagtattccatggtgtatatgtgccacattttcttcatccagtctatcattgttggatatttgggttggttccaagtctttgctattgtgaagagtgccgcaataaacatacgtgtgcgtgtgtctttatagcagcatgatttataatcctttgggtatatacccagtaatgggatggctgggtcaaatggtatttctagctctagatcactgaggaatcgccacactgacttccacagtggttgaactagtttacagtcccaccaacagtgtaaaagtgttcctatttctccacatcctctccagcacctgttgtttcctgactttttaatgatcgccattctaactggtgtgagatggtatctcactgtggctttgatttgcatttctctgatggccagtgatgatgagcatttcttcatgtgttttttggctgcataaatgtcttcttttgagaaatgtctgttcatatccttcacccactttttgatggggttgtttgtttttttcttgtaaatttgtttgagttcattgtagattctggatattagccctttgtcagatgagtaggttgtgaaaattttctcccattctgcaggttacctgttcactctgatggtagtttcttttgctgtgcagaagctctttagtttaattagatcccatttgtcaattttggcttttgttgccattgcttttggtgttttagacatgaagtccttgcccgtgcctatgacctgaatggaaatgcctgggttttcttctagggtttttatggtttgaggtctaacatgtaagtctttaatccatcttgaattaatttttgtataaggtgtaaggaagggatccagtttcacctttctacatatggctagcctgttttcccagaaccatttattaaatagggaatcctttccccacttcttgtttttgtcaggtgtgtcaaagatcagatagttgtagatatgtgacattatttctgaggactctgttctgttgcattggtctatatctctgttttggtaccagtaccatgctgttttggttactgtagccttgtagtatagtttgaagtcaggtagcatgatgcctccagctttgctcttttggcttaggattgactttgcaatgcggggtcttttttggttccatgtgaactttaaagtagttttttccaattctgtgaagaaagtcattggtagcttgatggggatggcattgaatctataaattaccttgggcagtatggccattttcacgatattgattcttcctacccatgagcatggaatgttcttccatttgtttgtatcctcttttatttcattgagcagtggttttagttctccttgaagaggtccttcacatcccttgtaagttgggttcctaggtattttattccctttgaagcaattgtgaatgggagttcactcatgatttggctctctgtttgtctgttattggtgtataagaatgcttgtgatttttgtacattgattttgtatcctgagactttgctgaagttgcttatcagcttaaggagattttgggctgagacaatgggttttctagatatacaatcatgtcgtctgcaaacagggacaatttgacttcctcttttcctaattgaataccctttatttccttctcctgcctaattgccctggccagaacttccaacactatgttgaataggagtggtgagagagggcatccctgtcttgtgccagttttcaaagggaatgcttccagtttttgcccattcagtatgatattggctgtgggtttgtcatagatagctcttattattttgagatatgtcccatcaatacctaattattgagagttttcagcatgaagggttgttgaattttgtcaaaggccttttctgcatctattgagataatcatgtggtttttgtctttgggtctgtttatatgctggattacatttattgatttgcatatattgaaccagccttgcatcccagggatgaagcccacttgatcatggtggataagctttttgatgtgctgctggattcggtttgccagtattttactgaggacttttgcatcaatgttcatcaaggatattggtctaaaattctcttttttggttgtgtctctgcctggctttggtatcaggatgatgctggcctcataaaatgagttagggaggattccctctttttctattgattggaatagtttcaggaggaatggtaccagttcctccttgtacctctggtagaattgggctgtgaatccatctggtcctggactgtttttggttggtaagctattgattattgccacaatttcagatcctgttattgctctattcagagattcaacttcttcctggtttagtcttgggaaggtgtatgtgtccaggaatttatccatttcttctagattttctagtttatttgcgtagaggtgtttgtagtattctctgatggtagtttgtatttctgtgggatcagtggtgatatcacctttatcattttttattgcatctatttgattcttctctctttttttctttattagtcttgctaccggtctatcaattttgttgatccttttaaaaaaccagctcctggattcattaattttttgaagggttttttgtgtctctatttccttcagttctgctctgattttagttatttcttgccttctgctagcttttgaatgtgtttgctcttgcttttctagttcttttaattgtgatgttagggtgtcaattttggatctttcctgctttctcttgtgggcatttagtgttataaatttccctctacacactgctttgaatgtgtcccagagattgtggtatgttgtgtcttttttctcgttggtttcaaagaacatctttatttctgccttcattttgttatgtacccagtagtcattcaggagcaggttgttcagtttccatgtagttgagcggttttgagtgagtttcttaatcctgagttctagtttgattgcactgtggtctgagagacagtttgttataatttctgttcttttacatttgctgaggagagctttacttccaagtatgtggtcaattttggaataggtgtggtgtgatgctgaaaaaaatgtatattctgttgatttggggtggagagttctgtagatgtctattaggtccgcttggtgcagagctgagttcaaatcctgggtatccttgttaactttctgtctcattgatctgtctaatgttgacagtggggtgttaaagtctcccattattattgtgtgggagtctaagtctctttgtaggtcactcaggacttgctttatgaatctgggtgctcctgtattgggtgcatatatatttaggatagttagctcttcttgttgaattgatccctttaccattatgtaatggccttttttgtctcttacgatatttgttggtttaaagcctgttttatcagagactaggattgcaacacctgcctttttttgttttccattttcttggtagatcttcctccatccctttattttgagcttatgtgtgtctctgcacgtgagatgggtttcctgaatacagcacactgatgggtcttgactctttatccaatttgccagtctgtgtcttttaattggagcatttagcccatttacatttaaggttaatattgttatgtgtgaatttgatcctgtcgttatgatgttagctggttattttgctcattggttgatgcggtttcttcctagccttgatggtctttacaatttggcatgtttttgcagtggctggtactgactgttcctttccatgtttagcgcttccttcaggagctcttttagggcaggtctggtggtgacaaaatccctcagcatttgcttgtctgtaaaggattttatttctccttcacttatgaagcttagtttggctggatatgaaattctgggttgaaaattcttttctttaagaatgttgaatattggcccccactgtcttctggcttctagagtttctgccaagagatcagccgttagtctgatgggcttccctttgtgggtaacccgacctttctctctggctgcccttaacattttttccttcatttcaactttggtgaatctgacaattatgtgtcttggagttgctcttcttgaggagtatctttgtggcattctctgtatttcctgaatttgaatgttggcctgccttgctaggttgcagaagttctcctgggtaatatcctgaagagtgttttccagcttggttccattctccccatcactttcaggtacactaatcaaacgtagatttaatcttttcacatagttccatatttcttggaggctttgtttgtttctttttactctctttcctctaaacttctcttctcacttcatttcattaatttgatcttcattcacttatatactttcttccacttcatcaaatcggctactgaaggtattgcatgcatcatgtagttctcatgccatggttttcagctctatcaggtcatttaaggtcttctgtacattgttttctctacttagccattcgtctaatcttttttcaaggtttttagcttccttgtgatgggtttgaacatcccctttagctcagagatgtttgttattactgaccttctgaagcctgcttctgtcaacttgtcaaagtcattctccatccagctttgttccattgctggtgaggagctgcgatcctttggaggagaagaggtgctctggtttatagaattttcagcttttctgctctggtttctccccatctttgtggttttatctacctttggtctttgataatggtgacctagagatggggttttggtgtggatgtcctttttgttgatgttgatgctgttcctttctgtttgttagttttccttcgaacagtcaggttcctcagctgcaggtctgttggagtttgccggaggtccactccagaccctgtttgcctgggtatcaccagcggaggctgcagaatagcaaatattgcacaacagcaaatattgctgcctgatccttcctctggaagcttcgtctcaaaggggtgcctggctgtatgaggtgtcagttggcccctactgggaggtgtctcccagttaggctagatgggggttagggacccacttgagaaggcagcctgtccattcacagagctcaaacactatgctaggagagccactgctctcttcagtgctgtcagatggggatgtttaagtctgcagaaatttctgctgccttttattcagctatgccctgcccctacagatggagtctacagaggcaggcaggcctcattgagctgcggtgggctcctcccagttcgagcttccagaccactttgtttacctactgaagcctcagaaatggtgaacacccctcccccacccagtctgccgccttgcagttccatctcagactgctgtgctagcagtgagcgaggctccatgggcgtgggacccactgagccaggcacaggatataatctcctggtgtgccatttgctaagaccattggaaaagcacagtattaaggtgggagtgtcccaattttcccagtacagtctgtcacgggttccctcatctaggaaaggtaaatcccctaaccccttgtgcttcccggtgacgcaatgccccaccctgcttcagctagccctccatgggctgcatccactgtccaaccagcccaatgagatgaacaaggtacctcagttggaaatgcagaaatcacccatcttctgtgtggatcaggctgggagctgcagaccggagttgctcctattcggccatcttggaatggcaatctatgtttgctttttacatttgaaaaaactggtgtcacgtacctaggtattaatcattgtggtatcctcttgccgatttacctctttatcattaactagtgaccctccttgtcttttgttgttacagtctgtgattttagtctattttatctaatatgagaatagctactctggcacttttttggtttccagcttcatgaaatatccttttccatttccctgttttcatttccctttcggtgtctctatagatgaagttgatttctttaaggcaccataagttgggtcttatttctttatccatttgaccatttagagaatttagaacactgtcagtgttattattcataagtaaaaacttaagagtgggtgtagtggtgtacatctgtatttcctgcactttgagagactgaggcgagctgatctcctggggtcaggagtttgagaccggcctggtcaacatgatgaaaccctgtctctactaaaaatacaaaaattagccaagcatgctggcatgtgcctgtaatccaatttacttgggaggctgaggcaggagaagcttgaacctgggagacaaatgttgcagtgagctgagatcacacagagaagtcatctccactctcctcatcagaacctcttgttcacagcatttgtgagcacaaatcaatgatggttattctttcctactaattagggatattttattacacagcaatagcctccagcaaagggaaccatcatacatgattcctacaagttgacagggctggaattatcactgaaaaactaaggtggctatacttgattcccaatgtccaatttttcatgaatagagaaatttatcctttttccccccagccagaaaccaagttttgctcttacgcccaggctggaatcaagtggcacaatctcagctcactgcaacctctgccccccagcttcaagaaattcaccttttgaacaaggagatattaaggatacactatgtgtatgctaccggtggttgcaggagactcagaaaagagagaaacagtcactggcctcgtgcaactgatattctcgggaggagagaaaggcaatcaagaaagaaacatgctgtatttcagacagctgtaagtcctccacaagaaaagaaagcaggtgaggaacataggaaatgtgtcaaccataaggttcccgctaattctataagttggtcagggatatcctccaagaataagcagcatctgagcaatcacctgaagggaggaaggaaggaagactgtgagtggtggcttacacctgtaatcccagcactttgggaggccaaggagggcagattgcctgagctcaggagttcacgaccactcagagcaacctgttgatacccaatctctactaaaaacacacaaaaaaattacccgggtgtggtggcacgcacctgtagtcccagcttccatgcccagctgatttctctctctccatatatatatatatatacacatatattgtttttgcagagatagggtctcactgtgtcacccagtcatcaagcaattctcttatactgttttggaaaagcatgggaattacaggtgtgaaataccctgctggtcctgaaaaatgtgatatttgggattctctgcctggcttgttttacccaaaataatgacctccagttccttccaggttgctgcaaaagacatgattttcactgttttataactgaatagtattcctgtatgtatacataccacattttctttatttattcttctgttgattgacatgtagggtgattccatgtctttgctactgtaaataatgctgcagcaaatatttgtgtgcattttgatctattcctttgagtaggtacccagtactgcaactgcaggactgagtagttgttatattttttgttctttcagaaatctccatagtgtttgccataaaatctgcactaatttacattcccaacaacaatgcataagatttccccttttctccacattctcactaacatttgttatgtttttgtctttttcataatacccattctgactggagtaagatatctcattgtggtggttgttgatatttttgagacggggtctcactctgttgccagactggagtgcagtggtgtgatcgtggcttgctgcaacctccacctcccgggttcaagcaattctcctgcctcagcctcccgagtagctgggactacaggcgcgtgccaacaggcctggctcattttttgtatttttagtaaagacagggtttcaccatgttggccaggatgatcacagtctcttgagctcatcatacacctgcctcagcctcccaaagtgttggaattacagtcatgaggcagcgcacccaacctcaatgtggttttaatgaccatttctctgacgattcatggtgtggagaatttctttgaaataccttttggccatttatatgtgctcttttaaaaactgactcctgtccaggtgcggttgagcatgcctgtaaccccagaacttcgggaggctgaggccaatggatcacttgaggcaaagaggcagaaatcagcctggccaacaaggcaaaaccccatctttactaaaaatacaaaaaatcagccacgggctgtgactcgtgcctgtggtgcaagttactcaggaggttaaggcacaggaattgcttgaacccggtaggcacaggtcacagtgagccaagatcatggcactgcactacagcatgggtaatagagaaagacctgtctcataaaaacaaatgaataaataaataagataaaaaataaaaaagtctctttatgtcctttgccgactttttaatgggattctttggagttttctgttgtagttgagatctttgtttactctcggtattagtcttttgtcaaaggaaaagtttacaaataatttcttccgttctgcagtttgtctgctcactctgttgagaggattatttctttggctgtgcagcagctttttgtttcagtaaagcttttgaatttatataattaaaattttcagtttggtttaaatttgcactggtcgatttttggttttgttgcctgtacttttgaagtcatactcttgaactctttactagacaataaccagaagagttttctctagttttcttctcacatttttattatttcagtacatatatttaagtctataattcatcttcaattgatttttgtagaaatagtgagaaataggagtccaggtttattcttctgcaaatgacaattcaattgttccagcaccaattattgaaaagggtgtgctttcctcaacgtatattcttatcagctttgtcaaagatcagttggctataaatgtgtggctttctttctgggctctctagtctgttacatcaatctgtgtgtctatctgtatactactaccatgctgtattggtgatgatggctttgtaatataatttgaagtcaagaaatgtgatgctcccagctttgtttatttgcttcagaaaggctgagtcaacagctgcagagatgaagctgcccctcctcgcagggctccttcccggaaaaagatcatggctcccactgaccatataaccatggctggaactcctgaaattcccaaagggaggccctacccagtgaggggggatgaatgaaggtcctacttaaggaatctgtctggccacaatcaggcacagcagctgtgctgccttgtgggggaccagaccacctggattccctggagcctgcaggctagaatgtctgagtccatggaaacacagaaatggaggccgccctcacctccccagaaaactgtagtctcaggcagtctccagccgattgccactggttggctgctattccaagccagtgggtcttaacttgagaggtgctgtggaagtggggcccacggaatgaggctgcttggctccctggattcagccccttttctaagggaatgtacagatggaactcccgccttgcccagctttccaagtatataaaactcctgagtctctgtgagtgtctgagcgagtgctctggcaacattcgacacggctctgtgtatctgacccaagacccttatggcatgagctaatgggaggatcttctgatccatgcgtggcaaagatgcatgggagaaacatggtttgtgggtaggggttgtgcattcactactgcttctcttggctgtaggtgaaggtttctttggctctgtgctgatactgggtgcaccatcacccaccccctttgtttcttctcctgggtcaagtcatttgcctaatcagtcccaatgtaggaacctggatacttcagttcaaggtgctgaattcaccgtgcttttcattcaggggaagacagctgcttctcattgggcatcttggcctgcccacttcacgtcactttttgtaaaatccacaccactccaggaatatccattacttaacttcgcctgaaataaacagaaggctcattacacttatcatgggctcacttacttcgcctataatgaaggtgccatggaaatgctagtggatgacgtggtccattttcttagggatgagatagaaaaatggtgtatggctttttaatttaattaaaatttttagtttggtttaaatttacattggtctctttttggttttgttgcctgtacttttgaagtcttactcgtgaactctttactggacaatgaccagaagagttttccctaagtttcttctgatattttgaccatttcagtacatacatttcagtctataattcactttaaattgatttttgtaaacatggtaagaaataggagttcagatttattcttccgcatatgataatgcaactgtcccagtaccaattattgaaaagggtgtgctttccctagtgtatattcttgtcagctttgtcaaagatcagttgcctatgaatgtgtggctttcattttggattctctcgtctgttacatcaatctgtgtgtccacatttatacctgtaccatgctgtattggtgactatggctgtgtaatatattttagagttaggaaatgtgatgctcccagctttgttcatttgcttcagctgaaaaggttgagtccacaattacaaagatggcagccgcccatccccggaggacctccaacccagaaagagatcaggcttcccaccaaccctataaccctggctggagttcctgaaattccaacagggaggaccttcccagtgaggagggatgaatcaaggtcaaatttaaagaaacagtctggccactatcaggcacagcagcagtgctgccttgtgggggacccctcctgctccagaccagctgccctccctggagcccgaaggctagattgtctgagtctacggaaacagagacggtggccgccccaaccacccagaactcggtagtctcaggcacttggcttgctatcttgccactgcttggctggtattccaagcccgtgggacttgagaagtgctgtgatgatggggaccacaggatgaggctgtctggctccctgtgatatggctgtgatgagtggaggaacaccagggctcatgtctcacacagaattggagaaaatgacacaaacacatgtacagtggttttatggcgtgcagtttaataggcaagaacgaaggaagagctccccatactgagacagagggaggggggctccaaagccaaaagaggaaacccggagtgctgtggataccaatgagttatatgaagaaactggagggggcggtgtctgatttgcatagggttcaggcgattggttcgaccaggcatgtcatttatgtggcccacggaaaaactggccctcccacctagcctttgaatatgcacgtgccggacaccctgatttcctacactcatggggatatatgggggtggccatatcgccaggcacaggtggggacaagggccagaagagggcgggaatcgctatgtttgggtggacccagtttctaatggccggcatctgcagatcaaggttaccggagaactctaaaagccggggctttcctgctagacaagactcatttctggagctgctttaaaaagaaacaaaacttcccaaggaccccttttcctccctgtctgcccaaaataatttcttaacaactcgtataacacctgaattcagcccccttactgggggaatgtaccaacggaactcccacctttcctggtttctcaaggctagattgtgtaaacctcctgggtctcggtctgtgtctgagcagctgctctgccaacactccacacagccctgtgtactaggcccaaggccgccgtgactcagcccatgggaggatctcctgatttcttggttgcaaagatccatgggagaaaaatggtttctggggcggggtcacacactcatggcttctcttggctgtgcaagaaggttcctttggctctgttccaatatagcgtggttcatcacccacccctgttttctttgttctcctgagtcaagttgtttgcctagtcagtcccaatgtgagaacctgaatatttcagttcacgtgcttatcgtgaaattcactgagactttaattcagtggaaggcagcctcttctaattggccatcttggcccgccccctccacgtcacctcccataaaatggccacgctctccagggacgatgccattatatatctttacgtgaaaccgacagaacacttattacactttttgtgagctcatttacttcacttataatgaacatggccatggaaatgctagtggagaaagtggtcgattttctgatggatgtgataaaaaaatggtttgccgaccaattaatgacatatgtctcaaaactagtaacgagacccttaatcgctgggttgaagtttctaatcaagaagatgctcatctatgtattcaacaaagcagcttcccttgcttctgaaatgcttccaaacaacatctcatatttcctgaagaagataatgcctggacaagcagcacaagtcattcaggtttactttcagctcataaatccagcaggatattcgcacaattgttgggaaaccttatcagttcatgagtcgtgcatgtttcctttaatttcaggaggaagagggtaatctggaagagtttcctgacctactctgctgctgtgattaaacaaccaccaggaaattttgatgacactgttctcctgagctcctccctttcctcggggaagaaaagcattgaaactacaaaaataaagtgttatttggctggagtgaggtctcatgtctgcttatgcggtggctcgctgctcagaacagggtgagtctctgagttgtacgctgaggaggggaggctgtcaatctagaaaaaacccattgcatgggacacctccatggggtctggggggctgaggatgaggagctggactggatctagggaaggaggaggtttcagagggtgaaattctggcagtaaatcctgggggtgtttgaaaacttcctccctcagaaggagaagactcagggaggaataaggacaaaccatgggtcccttgaggggcatttactaacttaagaggactttatcgggaagcagagtgacaatggcctccttgaggactgaggcccctggataaatgaggcccagatccagatccagtccatgggagatgagaccttcaagggacatatttttgttgggacagaggaaaagtgcagctctgcagctgcagaggaagccttggcagtgtgaaagcgaccttggagggggccctgtgcgttctgaatgcttctgaggtccatcccctgtccccgcctctttttctggattttttgggctccatggtctccgccatcttctgagcgctccacgctgccaccttcagttttctcttctgggctccaaatactccaaaatctttcatatctgtgcccctacccctgtttttagcatgtgttgggactccaggtccctgaaggtttctggcctgaaatccacctccccagcggtgtggattctgctctagagaccccgcacttggcaaggttcccaggcccctgggggacaaccgagtggtatgtgcacttcagggctccacactcggcaaggtctttcaagcccttggggttccctcctcagttttcttcacatgtctgggatgtagtcactctataaatgccgggatgtgatccccaccccagtgattttttttagttccatgagtgttgctatctgaatagtcatcctgagagtgatgggaccttttgaatttgcagcaagttttagattagtgtgagtggcctgagatcgcaaaactggggctagcattggatgtgaggttaggctggtggaaaaatttgcccagaacctgaggagtgtgggctcactgcaggtggttaggatcagcacagaattgcaaggatgtatagctttggggtaaagaataacatggttcagaagtacatgtattagtcttttcatgcattgctataaagaattacctgagactgggtaattaattataaaaactcaggtttaattggctcatggttccacaggctgtacaaaaaggatgatgctggccatcagctcaacttctggggaggcgtcagaaaacttagagtcatggcaaaaagcacaagggaatcaggctcatcctccatggccagagctggagctagtggtaggagaggtgctgcacacttttgaacaatcagatctttttagaactctatcaccagacagcacctagaggatggtgctaaattattcatgaaatatccacccatatgatccactcaattctcaccggcccaaccaggaccacctccaccattggggattacaattacacatgagatgtgggtggggacacagatccaaactcgatcagtgggcatcttggactgggtctactatagaagaagaaccaggagctgactatcatccttaagactgcccatgatggccaggcagggtggctcatgcctgtaatcccagcactttgggaagccaaggtgggtgaatcccctgaggtcaggagtttgagaccagcctcgccaacatggtgaaaccctgcctctactaaaaacacaaaaaattagatgggtgttgtgccagacgcctgtaatcacagctactccagaggctgaggcatgagaattgcttgaacctgggaggcggaggtggcggtgagccccaatcgcactgctacactccagcatgggcaacaataccaaaacatcgtctcaaaaaaaaaaaaaaaaaaaaaaaaggctgcccatgaccactgccccagtgagagggacaccagcatggctaagatcaagtgctggacattcttcatgggtcagacattaaagcaggccacactgttacagagatgggctccattcatagcaacaaagtggtgagaagatgtgggaatggcagaggccagcactttgccatcaatgcaaggtgggcataaggagctggcaccagtgccagagtgcatcaggggaggactgctttgcaatatctagcacttacctcttagagtatgtttcattagggacaacagatataaatggcagacaagtgagtcccttcagtaacaggaaatagaaatcatcaagaggaacagaaacagatgtcagcagccctcatataaagtcatcatccttcatccagttaaaacctgagacagttctcacataagaaggtctaattcaaaaagagactgggttctcatgaggcaggttcatgcaaaaccaagggaagtatacaactttgggattctccagcttcccttggaaaagacctacaatcatttgcttaggtaactgagcactgaacaaaggtgagtattgttatctttcagaagctgttggccatgaaggtcttgctggcataaaacccatggttggaaacatcaccatgacccctgttagagtaatggcctaagggcaagggtcaggaaattgatgtattccttgccaacttctgcgagacgagtgttggtccactcatctctttcacggaattcaccagtctggtatcttcaaaatccagaaggatgatggcagatggcaggaaactaatgcaaacaccatcagttgtacctccactgtagcagcagtaatggatgttatctcttcattgtaatatccagggagggagaagatgacattattctcaatattctaaacaccctgtgtgtacagcctctgtgatattttttgtaatatccgtgtgggagagaattatattactcctaatatctcaggggttgtgccccctctgtgacaatgttcctaacacccaggaggggataggatgatatcacttttagcatcacagggggtgtacaccccactgtaatattgttcataatatccgggggggagagaatgatattactcccaatatcgcaaagactgtacaccaacctgtgatattatttgtaatatccataagaggaagaataatattactcccaatgtcacaggaagtgtacacccttctgtgatattgttcaaaagatccagttagggaggggatgatattactctcaatatcttaaacaccctgtaggtaagccctctgtgatattcctcataatatccagagggagaggatgatattactcccaatattgcatgaagtctacaccccacctgtgatattgttcctaatatccaggatgggagaggatgatattactcccaatgtcgcaggggatgtacaccttccctgtaatattgttcgtaatatctagaaaaggagaggataatattactttcaacatcgcagggggtgtacaccttccttgttatattgttgctaatatccagggaaaaagaagatgacattaccaccactattgcagaaggtgtacacccccccttgatatagttcctaatatccagaaaaggagaggagatattactccaaatattgcaagaggtgtacattcccctgtaatatttttcctaacattcaggaagaaagagagtgatattgcccttaatattgaagggagtgtgccccccccgtgatattgtttctaatatccaagaaatgaaaggatgatattactcccaatatcacaggggctgtacagccccctcccatgatattgttcccaacatcggggggggggtgaaatagtattattcccagtatcacaataggtgtacacacctgtcgtgatattgttcctaatacccatgggggaaaggacgatattattcttaatatctcagagggatgtacaccctccctgtgatattgttcctaatatccggggtgggagaggatgatattacccccaaaatctcaaagggtgtacacccctcttgtgatattgttcctaatatccagggtggagaggataatattattcccaatatccaggaaaggaaacgatgatgttactgtgaatattccagggggtgtcctcccctctgtgatattgttcctaatatccaggttggggagattatgatatttctccaaatatcacaaggggtgtacaccaaccctgtgttattgttcctaatatcgatggggggagaggacgatattactcccaatatcacagggggtgtacaccacctttatgatattgttcctaatatccatgaagaaagaggatgatattactttcaatatcgcaggggatgtacactccccctgtgatattgttagtaatacctaggagaagaaagtgtgatattactcccaatatcgcaggggatgtacacgcttcctgtgatattgttcctaatatttagggggaaaggggatgatattactcccaatatcgaatggtgtgtacacccccccgtgattctttttttttttttttttttttttttgagatggagtcttgctctgccgcccagactggcgtgcaatggcgcaatctcggctcactgcaacatttgcctcccaggttcgcacgattctcctgcctcagccttcggagtagctgggattataggcagctgtcaccataccaggctaatttttgtatttttagtagagttggggtttcaccatgttggtcaggctggtcttgaattcctgacctcaaataatccacccaccttggcctcccaaagtcctgggattacaggcataactttccctgtgatattcttcctaatattcaggaagaaagaggatgatattgctcccaatatcgcagagagtgtgcactcctcctgtgatatggttcttaatattcagaggaggagaggatgatattactttctatattgcagaaggtgtacacctccctcgtgatgtctttcctaatatccagtgggggagaggttattagtctcaaaatcacagaaggtgtaaacccccatttgatattgttcctaatattcaggggtggggagagaaaggtattactcctagtatttcagggcatgaacacccccaccgtgatatcattcctaatatccagaaggggaggcaatgatatttctcctaatatcacaaagggtgtacaccccttctgtgatattgtaaatattctgtgtgtacacccccctgtgttatagtctgtaatatccgggtgggggagagggtgatatttctccccatattgtaggggatgtacacccttctgtgatatggttcgttatatccagggaagaaaaaggtaatattgctgcccatattgtggagagtgtacacccccatgtaatatggttcgtaatatccaggagtggagagggtgatactgctccttacatcgaggaaggtgtacaccttattgttatatgattcgcaatatccaggggaggagagagtgatattgctccccatgtcgcagggggtgtaaaccctccgtgatatgattggtaatatccaggaaaggaaagggtgatatttctccccatatcgcgggggacgtacatcctcctgtgatatggttcgtaatatccaggaggaaagaggaaaatattgctcttcataacccgaggggtgtacaacccctgtgatatggttcgtaatacccagaagtgtacacccctctgtgatatggtttgtaatatccagggggttagagggtgatattgctccccatatcgcagtgggggtacacccccctggattggttcataatattcatggggggagaaatttacatttatcctcatatcagggggggtgtacaccccccgtgatatggttcgtaatatccaggggaagaaagggtgatattgctccttatatcgcggaaggatcaccctcccctgtgatatggttcataatacccagacgggaagagggtgatattgttcttcataaagcgaagggtgtacagccccctgtgatatggttcataatatgcaaaaggggagagggtgatattgctccccatatcacggagggtgtactcccttctttgatatggttcgtaatatccaggggtgtagatggtgatatagctcgccctattggggagggtgttcacccctctgtgatattgttcgtaatgtccagggaaagagaggatgatattactcccaatatcgcagaaggtttacaccactctgtgatattgttcataatatccagggaaggagaagacgatattactcccaatatggcagggggtgtagaactcctgtgatattgtttgtaatatccaggcaaggagaggatattactctcaatatcgcagaaggtttacacccctatgtgatactgttcatgatatccagggaaaaagaggatattactccctatatcacaaagggtgtacacccctttgtgatattttttgtaatatccaggggagagaggataatattactctcaatatcagaaggggtgaaaaccctcctgtgtcattgttcataatatttagggaaggagagagtgatattactccaaatatcacagtgggtgtacacccccctatgatattgttcctaatttccagaaggggagatatgatattattgccaatatcgcagaaggtgtacaccttactctgacattgtttgtaatatccagatggggaaatgatgatattactcctaatatcacagggggtgtacacccccttgttttattgtttgtaatattcaggggaagagacgattatattactcccaatatcgcagggtgtgtacaacactctatgatattgttcataatatccaggggaggagaggaagtgtacacccccccgtgatattgttcgtaatatccagaggtagagaggatgatattactcccaatattgcaggtggtgtacacctttctgtgatattgtcatgatattaagaaggggagaggatgatattactaacaatatcacaaaaactgtacactccctgtgatattgttcataatatccagaagaagggaggatgatattattctgaatctcgcagaagatatacaccaccctgtgatatggttcataatatcctaggggaaagaggatgacataactgtcaatatcgcagggggtgtacaattccctgtgatattgttcacaatattcagagggaaaaaggataatattactttcaatatcgcaggcggtgtacacattactgtgttattgtttataatatccggaatgagagaaaattttctcccaatatcacaggaggtgtacactcccctgtgatattgttcgtaatatccagggaggggagaggatactattactcccaacatctcagggagtgtaggccccccctttgatattgttcctaatattcggaagtggagaagatgatattacttccaaaatcgcagggggtgtacactccctctgtaatattgtttctaatattcatgagtggaaagaaagatattactcccagtattgcaggggacatacaccacactgtgatcttgttcacaatattcgggggggagaggatgatattactcccaatatcaaagtaggtgtacacccccttctgatattgatcgtaatatccagaattaaagatgataacgttactcccaatattgcagggggtgtacatttttgaatactgttcataatattaagagggggaggggatgatatctgtcccaatatcgcaaagtgtgtacacctcctgtgacattgtcccaaatatccagaggaaaaaaggatgttattactcttaatatctcagagagtgtacacctccctgtgatattgtttgtaacatccagaagaaagaggctgatattactcttaatatcgcagggggtgtacacccccgccccgggatattattcgtaatatccagggggaagtggaatgttcagaatgggagaggatgatattacttgcaatatcatagtgggtgtacaccccactgtgatattgtttgtaatatccgggaaaggagaaaatgacattcctccccatatggcaggggctgtacaccacctatcatattgttcaaaatatccagaaggggagaggatatgtctccaagtatcacagggggtgtacaccccgctgtaatattcttcctaatatccagggtgtgagaggataatagtactcccaatatcccagggcatgtacaccccccttgtgatgttgttcctaaaattcatggggagaaagaatattactcccaatatcacagggggtgtacatacactctgtaatattgttgccaatatgcagcaggagagaggatgatattactcccaatatcacaggggctgtacaccccgctgggatattgtttctaatatcaagggggaaaaaggatgatattactcccaatgtcgcagggtgtgtacttcctctttgtgacattgttcctaatatccaggagagaagagggtgacattccttccaaaactgaaaggggtgtacacaccctttgagatattgtctttaatatccagaacgaaacaggatgatataactcctaatactgcaggggggtacaccctctctgtgatactgtttctaatatccaggaggggaaagaaaaatattaatcccaatatcacagggggtgtacattccccctttaatattgttcctaatatccaggaagacacaggatgatactatttccagcagcacagggcatgtacacccctttgtgatattgttcctaatatccaggaaaagagaggatgatattactgtcaatattgcagggcgtatacactggttctgtgatattgtttctaatatccgggggtggagaaaatgatattactcccaatattccagcgggtgtacacccgttctatgatattgttcctaatatctgggggagagagaatgatattattgtcaatatcacaggggatgtacagattccctgtgatattgtttctaatattcacagggggagaagggtataatactcccgatatcgcagggggtgtacactccccctgtgaagttgttcctaatatccagggattgagagaatgatattactcccaatatcacaggcggtgtaaaccccctgtgtgatattgttcctaacatccagaggaaaagatgatgatattattttcaatatcacagggggtgtacgcatccctgtgatattgtttctaatatccaggggaggagaggatgatattattgttaatatcgcagggggtgtaccccaccctgtgatactgttcctaatatccggggtggaagaggataatattgctcccaatatcgcaaagggtgtacaaccttcctgagatattggtcctaatatccagggagggagaggatgatattactttcaatatcacagggagtttacacaacccctgcgatattgttcctaatatccagcggaagaagagttaggataatactattttcaaaattgctgggtctgtaccccctccccgtgatattgtttctaatatccaggaggggagaaagtaatatgactcccaatatcttagaagatgtacaccctccccataatattatttcttacatccagggggtagaggatgattttgctttcaatatcacagagggagtaaacctttccggtgatattgtttttaatatttaaaaagagagaagataaaattactcccaatacaaaggggatgtattgtgtactcccccctctgatattcttttttaatatccagatggagagaggatgatattactttcaatattgcatgggatgtataaatcccctgtgttattgttctgaatatacaggtggggagagtatgatattactccaaatatcgcagggggttctttccccctgtgatattgttcctaacattcagggagggagaggatgatattactcttaatattgcagggggtgtacccacgcctatgatattgttcctaatatccagagggggagaggatgatctaactcagaatatgacaaggggtgtacacacagcctgtgatatggttcctaatatacaggggagaaggggataatatttctcccaatatcgcagggggtgtacaaccccctgtgatactgttcctaatatacagaaggggacagcatgatattgttcctaatatcgcaggaggtgtacaacgccctgtgatattgttcctaatatccagggcgggagaggatgatattaccctcaatatcgcagggggtgtgcactttccctgttatattgttcctatgatccgggtggggggaaatgacattagtcccaatatcgcaggatgtgtgcaccgctcccccgtgatattgttcctaatatcaagggggagagaggaggatattactcccaatatcgcaagggatgtacatcctccatgcgatattgttcgtaatattcaggaggagagaggatgatattactcttaatatcgcagaaagtggacacccaccctgtgatgttcttcataatatccagggaagcagacgattatatgactttcaatatcgctgggagtgtacatcccttttgggatattgtttctaatatccaggaagggagaggattatattactctcagtattgcaggcagtgtacaccttttttgtgatattgttcctaatattcagaaagggaaaggatgatattactcccaatattgcaggtggtgtatatccccctctgatattgttccttatatcaaggaagagaaagaataatattactcccaatatcaaagacagtgtagacccctcctgtgatattgtatttaatatccatggggaaagaggatgatgttactcccaatatcgcagggggtttacacccacactgtgatattattcctaaaatccagtggaggagaaaataatattgctcccaatattgcagggtgtatacaggccctcccccgttatattgctcctaatatccagcggtggagaggatattactttcaatttgtgtagggagtgtatacccccctgtgatatttttctaatatcaaggatgggaaaggatgacattactcccaatatcgcaggaggtgtacacgccctgtgatattgttcctaatatctagggaaggagaggatgatattactttcaatattgcaggagctgtacaccctctgtggtattgttcttaatatttaggttgggagaaaatgatatgagtccaaatatcgcagaaggcatacacacttccaataacattgttcttaatatccgggggagagggtgatattactcccaaaatctctggggggtgtacacccccttctgatatttttcctaatatccagggaaggaaacgatgatattactataaatattccaaggagtgtacaccttcctaatatcctaatattgttcctaatatccaggggtgggagaggattatattactcccgatatcgcagtgggtgtacacccctcctgtgatattgtttctaatatccaagctaggagaaaatgatatcactctcaataccacagggggtgtacaccttccgcatcatattgttcctaatattcagagggaaagaagatgaagttactttcaatatcggaggggttgtacacaacccctgtgatattgctgctagtatccaggaagaaaggggattatgttactccccttatagcagggggtatacacctcccctgtaatattgttcctaatatcaaggctgggatatacgtggggggaaggatgatattactcccaatatcgcaggggttatacaaccttctgtgatattgctcctagtaaccagggcagaagaagatgatattactcctaatatcgcaggaggtgtacactcccccattatgttgttcccaatatgcagaaaaggagaggatgacattattgccagtatcgcagggtgtgtacaccacccctgtaatattgttccaaatatttagggggagagaggatgatattactcccaacatcgcagggggtgtacacacatcccctgtaatatagttcttaaaatctaggggaaaaggggatcttatttctctaaatattgcagagggtgtacactccccggtgatattgttcctaatagccgggagggagataattaaattactttcaatatctcagagagtgtacatcgcccttgcgatattgttcctaatatccagagcaaaagagaatgatattactcccaatatcttaggagtgtacatttaacctgtaatattgttcctaatatccagggggaagagaatagtattactgccaatatcgtaggggttgtacaccttttctgtgatattgttgcaaatatttagtagagggaaagaatattactcgcaatatcacagggaatgtatacttcccctgtgatattgttctgatatccagaaaaagagagggtaatattactcccaatattgcagggggtgtacaccccccttgtgatattgatcctaatataaaggaaggaagaggatattactcctcatatagaaggggttgtccaccccccttgtgatattattcctaatattcagggaagcagaggatgatattattttcaatatcacagagggtgtgcagtccacctgtgatattgttcttaatattcggggggagaggatgttattatgcctgatatcgcagtagaggtacacccctcaagtgatactgttcctaataaccaggggtgaagaggatgatattactcccaatatcgcaggtggtgtacacccccccatgatggtttctaatatacagagggggagaggaaaatattactcccaaaatcgctggaggtctacaccccccttgtgatattgttcctaatatccaggaaaggaaacgatgatattactgtgaatattccagggggtgtacacccgctttgtaatattgttcctcatatccagggtgtggagaggattatattactcccagtatcgcagggggtgcacgacgcccctgtgatattgtttttcatatccaggaggggagattattatcaatatggcaaggggtgaacaccccctgtgatattgtacttaatagttaggttggcagaaaatgatattagtctcgatatcgcagggggtgtgcactccgcctggtgatattgcttttaatatcaagggggagaaaatggcattactcccaatatcgcagggggtgtacaccgctcatgtgatattgttcctaatatccaggtggagagaacataatattactcccaatatcgcacaaggtgtacacccctcctgtgatatggttcctaatatccatgggaggagatgatgatattactcccaatatcacaggggatgtacaccacccttgtgatattgttcctaatatccagggaagaaaacgatgatattattgtgaatattacagggagtgtacacactccctgtgatattgtttttgatatacagggtgggagaggatgatattactcccaatatcacataaggtgtacaccccccgtgatattgttctaaatatttcggtggggagaaaatgatattagtctccatatcacagggggtgtgtgctcctcaggtgatattgtttttaatatcaagagggggaggagattatattactttcattatcacagggggtgtacacccctcctgtgatattgttccttatatccaggcgaggggaaaataatattactctcaatatcgcaggaggtgtacacaccccatgtgatattgttcctaatattaagggggaaagaagataatattactttcaatatcacagggtttgtactcctttcttgtgatatagtttttagtatccagggggaaagagcatgatattactcccattgtagcaaggggtgtacacacctcctgtgatattgttcctaatatccagaagtggtgaggatgatattactcccaatatcgcagggggtatacaccccacctatgatattatttctaatatccatgggaaaagagtatgatattacacccaatgtcgcagagggtgtgtatttttcctgtgatattgtttctaatattcaggcggggagaagatgatattactctcaatatagcagaaattgtacatccccgctgtgatattcttcataataatcagggaaaaagaggatgatattactaccaatattgcaggggggttacacttcccctatggtagtgttcctaatatccaggaagaaagaggatgatattaatcccattatccaggaagtgtacacccaccctgtcatgttgttcctaatatccagcagggaagaggatgatattacaccccccccccgtgatattctccttaatatccaggaggggagaggctgatattactggatatatagcaggggtgttcataccttctgtgatattgttcctaatatccagaaaaggagaggatgatattacttccaatatcgcagaaggtgtacacctccctgtgatattgatcctgacattcagaaggggagaggatgatattactcaaaataccgcagggcatgtgcattcccttgtgatattgttcctaatacccagaagggaacaggataatattactttcaatatcgcagggagtgcacacccccctttggtatggttcttaatatccagaaggaaagagggtgctattactttccatattgcaaggggtgtacaccccactgtggtatggttcataatatccaggcagggagagggtgctattactccccacagtgcggggcatgtacaccctgctgcggtacggttcctaatatccagggggagagaggatgctatgactccctatatcgcggggtgtgtacacccctgtgtggtatgttttgtattctccaggaacggagagggtgttgttacccctcatatcgctggaaatgtacactcccctgtggtatggttcgtaatatccaggggattgagggtactgttacccccatactccccatatcgtggggggagtgcacctccctgtggtatggttcgaaatatccagggtaagagagggtgctattattccccattttgcaggaggcgtacacccccctatggtatggttcgtaatatccggggtgaggggatgctatcaaaagaagagagaaagagaccccccatattgttctatattattttatactcagtacctgttttaagaagaaacaaggaagtgaaaccaaaagcaggcagcccggcgccaggcaccagacccaaaaccagacccgaaaccaggcctgggcctgcctgaccttagcctgatagttaaaattcaacccatgacctagcaaccaatgttatccatagattccagacattgtatggaaggacattgtgaaatttcttgttctgtgctgtttcactctgattaccggtgcctgcagcccctgtcacatacccactagattgctcaatcaatcatggccctttcatgtaagatctttagtgttgtgagcccttaaaaaggacagaaattgtgcactcaacaagctcggattttgagacgctagtctttcgatgcttccagctgattaaaagccacttccttcactacctcggtgtctgtggggttttgtccgcgactcctcctgctacactatgactccccatatcaaggggggtgtacacccccctgtggttcgtaatatccagcaggggaaaaggtgctattactccccatattgcagggagtgtacacccccttgtagtatggatcgtaaaatcaaggggggagggaaggtgtaattatccccatatctcagggggtgtacacccctttgtggtaaagtttgtaatatccagggatattacagggatattatccccaaattaatacttttataatttcttatgcctgcctttactgcaatctctgaacataaattgtgaagatttcatggacatttatcacttccccaatcaatacttttataatttcctatgcctgtctttactttaatctcttaatctcatcatctttgtgagctgaggatgtatgtcgcctcaggaccctgtgatgattgcattaactccacaaattgtttataaaacatgtgtatttgaacaatatgaaatctgggcaccctgaaaaagaacaggataagagcgatgttcagcgaacaagggagataagcataaggtctgactgcctgtggggctgggcagaacagagtcacatttttcttattgcagaaaatgagtaggagaaatatcactgggaagggaacgcattcctaggggaggcctatggacggccgctctgggggtgtatcccttatgtggttgaagataagggatgaaatacaccctggtcccctgcagtgccctcaggcttgctaggattagaaattccagcctggcgaattctagtcagaccagttctctgctcttgaaccccgtttcctgttaagatgtttatcaatgacaatgcgtgcacagcaggacatggaacctcaatagtaattccattttctccctggccttgtgaccttgctaggcccttctgcccttgtgatcttttattgccatttgaagcatgtgatctctgtgacccactccctattcgtatccccctccccttttgaagtccctaataaaaacttgctggttttgcagatcaggtggtcatcacagaacctgccgatatgtgatgtcaccccggaggctcagctgtaaaatttctctttcgtactctttcactttatttctcagaccaggtgacacttaaggaaaatagaaaagaacctactttgaaatattgggggctagttcccccaatagacattgttcctaatatccagaaaaaaagaagatgatattactcccaatatcacaggggttgtgaaccccacctgtgatatggttcctaatatccaggaagggagagaatgatattactctccatattgcagggggtgtgcacatccctgtgatattgttcctaatatccaggggaggagagggtgatattactcccaatattgcaagggttgtaaactccaccctgtaatattgctcctaatatttaggatttagggggggagaggataatattactcccaatatcgcaggggatgtatatgccctctttgatattgttcctaatatccagggggggagaggataatattactttccatatcacaaagagtgttcacccccctgtgatattgttcctaatatccaaaaaggaagaggatgatatcaatcccaatatcacaggaagtgtacaccccccccttttatattgtttctaatatccaggggaaatgagggtgatatttctctcaatatagcagaatgggtacactccccctgggatattattcctaatatccaggggaaaaaaagaggttgatattcttcccagtatagcagggaatgaatacaccctttgtgatattgcttctaatatcaaggggaaaagaggatgatatgactcccaatatcacaggggatgtaaacctgtggcgttgttgctaatatcaaggagggaagagtatgatattactcctaatgtcgccgaaggtgcacactttccctgtgatattgttcctaatatccaaaagggaagagaatgatattacccccagtattgcagggtgtacaccacccctgtgatattgctcctaatacccaggaaaaaagagaatgctattacccccaatatctaaggggacgtataccttccctgtgatattgtttctaatatccaagtggggagaggatggttttactctcaatattgcagggagtgtacactccccctgtgatactgtttctaatactcgggctgggagaaatagtattactcccaatatcgcagtgatattgtttccctgtgatattgtttctaatatctagtgggggagataattatattactaccccatacacaggggagggtgtacattcccctgtgatattgtttgtaatatccagggaaggagaggatgttactcccaatatcacaggggttgtacaccccttttttgatattgttcctaatatctggggggcagagaattatattactgtcaatatcacagagtgtgtacaccccctctgttatattactctttatattcagggcggtagaggatgatattactccctatatcacagggggtgttcacccctcctgtgatattgtttataatatctaaggggaaagaggatgatatcactctcaatatcaaaggaaatgtacacctttcctgtgatattgtttttattatataggggggcagaggatgatattaagaacaataccacaggggatgtacacccacgtattgatattgtccctaatatgtatggggaaagaggacagtgtaactcccgatatcgcagagtgtgtacacccccttgtgatattgtttctgatatacacggggagaaaagataatatttcttccaaaattgcagggggtgtacaaccccctgtgatattgtttttaatatccagtgggggagagaatattactcccaatattgcagggcgtgtacacaacccctgtgatattgttcctaatatccagagtaggggaggatgacattactttcaatatcgcaaggggtgtacattcccctgtgatattgctcctaatatccatgaggggagaggatgatattattcctaatatggcaggggctgtacaccttccctgtgatattgtttctaacatccagtgggggagaaaatgatattactccctatatcacagaaggtgtacactttccctgtgatattgttcctaatatccagaaggggagaggataatattactcccaatatcgcaggaagcttacaactcccctgtgatattgtttctaatatccagggaggtagggatgatattactcccaatatcgcaggggatgtacactcccccgtgacattgtttctaataaccagggggtgagaggatgatattacgcttaataccgaagggggtgtacacacccttgtgatattgtgcctaatagccagggggaagaaaattatattaattttaatatttatggggaaaaaggatgatattactcccaatatcacaggggctgtacaccgaccttttgatattgtttttaatatccagaagagaagaggataatattgctcccaatatcagaaaaggtgtaaaccccttctgtgatattggtcctaatatccagggagggagagaataatattactaccaatatcacagaaggtgcccacccccaaggtgatattgctcctaatatccaaagataatagggtgatgttactcccaatatcacaggaggtgttcacaccccttgtgatattgtttctaacgtacagggaagggagaggatgatattattcccaatatcacaggaggtgtatactcctctgtgatattgattttaatattcggggggaaaggatgatattactccctatatcgcagagggtgtacaccctctgtaatattgatcctaatatccagggcgggataggatgatattactcccaatatcgcagaaagtctacacaacccccagtaatattgtttttactatccagggggaagaggatgacattactcccaatttcacagagtgtgtacactcaccatttgatattgtttctaatatctagggggagagaatatattactcccaatatcacaggaattgtacaccacctctgtgacattcttgtgaatatccggggaaaaagagaataatattactcccaatattgcagagcgtgtacacccctccatgatatcgatactaatatttttttaaagaggatgatattactcccattgtcacaggatgtgtacaccccccttgtgaaattgttcataatattctggggggagagcataatattactccccatatcgaaaaaggtgtccaccctccttataatatggttcctaatatccaggatattacttaatccaggatacttgtaataccctaaatatacaattgcttgaacctccacctcccaggttcaagcaattcttctgcctcagcctcccgagtagctgggactacaggggcacaccaccacacccagctaatttttttttcttgtatttttagtagagatggggttttgccatattggccaggctggtctcaaactcctgaccttgtgatctgcccacctcagcctcccaaagtgctgggattataggcgtgacccaccgtgccaagccaggaagaggatgctctatagatttccccaataagagatggctttgcagggccattccaaaatatgtcaaagaaatacatttggggataaaatactttgatttcctttagggaatgttatctattatgtgatgctataccagagtcaggttggagtcggttatcttattgcaacaaagagtctgttccgtcactgttgggatctctattttttcctcttatttcttgagacagggtctcactctgtcacccagtctggagtgcagtggtgcgatcttcattcactgaaacctctgcctcctgtgttcaggtgattctcgtgcctcagccccttaagtaactaggattacaggtgtgcgccaccacacccagctaatttttgtattttcagtagagatggtattttgccctgttggccaggctggtcttgaactcctggcctcgtgtcatctgcccacctcgacctcccaaagtgctgggactgcaaatgtgagctattgtgcccagccaggatctctgttttaatgttagtgctggtcactttgcatgaactccaaagggaagaaatataatgaggtgtgtctgaccccctgccttctcatcgtgacctgaattagtttttcaggtttgcaggggatacccttggacaagaaggggctctattcggttggttggggggattagaattttactttttgtttacaatatttctcctgaaagagttaggggctcacaaggaatttccgcgtgagcaacttatgaggaaagccatctgggaagatatgtgtccttgtgtcactgggatattctcgtttaccccaatgatacggcaatgacgcagggttgtgaaattacagctatgtgtttggggaaaaaagaaagcaggattgtgtgactacgtttccaaacttcacttgcccttagccatagtgagttgggggcctggagattctgttttctttcacaatgatatagatacaattaaatgtatagaaagcaaaaaaataaaaaggtgagtaatgaggaacctctgattcctgagtggccatgtagttacccatggcacagagccacagttactgaaggtaaagtttgctggggaatttagaaatgaatccagctcttggaggagtcagtttactggatgcctaagaaaatgcaaacaaaataagaaaaaagggtaatattcaatcccatagttattgttacctgtcatagctaaagtaaaattaaaacagagtgctggcttcaatcttgatgctacactaagcttagatttcagtgaatgtgagtctcagccactagctcagagccacctcccaaagaccaaatcatgtagggacaatagaaagtacttctgagaattgtggttaccaagaacctagtaactgttggggaggagcaaaacaaagtacagaaaccagagggtacaatctgagtgagactgctatcagcttctggaggagcctttactaaaatgaatgatgagagtaactggatgatgagagtaactaatggatgatgagagtaagcaatgtctttggttttcttttttttttttttttttttttagcagacgtctcactcttgtcgcccaggctggagtgtaatggcatgatctcgcctcactgcaacctccacctcctgggttcaagcaattctcctgtctcagcctcccgagtagctgggactacaggcactcatcaccacacctggctaatttttgtatttttagtattttctggtgagggtccaggtttccggaaacaactcagagacatatgttaagatgttatctttagttttcacagggaaccaaatatgttacgactccaatttccttggctattgttttaagttaccattaccttctcgttgatcaagttgctcatttacttctcaagcctagctagatgcctggaatttcccttgaaggaagtcaagattttcctttatctccatactggctgatggtgatcgagtaagcccctaagaggggtccctgctccatctcgagatgctgctagattctacagtgcctaataaacagctctcgcctggccgacaaagagctgcttgctctctggatagcaattccaaagtgaacagacaacatcctgtttggaagactgccactctgttagaagaagcatcaggaaaacctttcttttgagctatttataactaacagcaattgaccaagtatacttttgtgagtgaaactgacctttctccctgtaagaattctccaaaatttggaaactatttgtgagtatttttacttatggcaatataattattggcacaagctcaatcagattcggttttctttcgtaacaggaaccattggagatactcattactctttgaaggcttacagtggaatgaattcaaatacgacttatttgaggaattgaagttgactttatggagctgataagaatcttcttggagaaaaaaagactgggtatattttcaatatgctttccttttaaggtccctcacctgtggaaagtaaagaatgtcactttctgacaggctcaggaacctcaagttatgtagggatctcaagaagatgggggaattcacccagttcatacaggtgaaattgctgttgcaaagattatgaatatgagagaagtccagcatggctgacttcatctcgtgtctggcctcaggctggctgcccttgctcactcttgggcataggccaagctagccatgggaggaatttagtttatagtttaactttgaagcacggatgataatagtctctccctaaaatgaaccccttccttgctcagggactgaaactacctttgtatgacaaatgaaagcccacaagattaagattatgagaggggcctgaattctgctaaaatgcaggtgtagctgactgataacaagtcattgtcccacagcttgcctttctataatctcttgcttctcaggagtcacatggccagaggtcctgagatttccagtcctgtgacccccacccagagatggacttagtgcatgaggaccattttccacacccctatgatttcatcctcaaacaatcagcagcaaccattccctagccccctgccttccaaattatccataaaaatcctagcctctgagttattagggagattgattaataatcccagtcctaccccttgggttgctctgatttaattaaaccttctctactgcaataccacggactcagtaaattggttttgtctgtgcaatgggcaagaagaacatgttgcatggttatacaggtactacaagcacagtctgatggcaaattattggttttgcttcctgcccttgatgtttctaaacatctagtccaaaattacttgtgaaaggtccagcaaagccaattttaaaagaggctatatggccaatcactattctttctacacattattgcaaataatcaggccacggctgggcacggtggctcatgcctgcaatcccagcactttgggaggctgaggcaggatcacctgaaatcaggagttcaagaccagcctaggcaacatgataaaaccctgtctctactaaaaatacaaaattagccaggcatggtggcatgcacctgtaatcccagctacttgggagactgagggaggagaatcacttgaacctgggaggcagagattgcagtgagctgagatcacaccactgcactccagcctgggcaatagagtgagactttgtctcaaataataataataataatcagaccaagtataatgaaattaaaatttattttgcaaataaattggtcctactacaatttatccttcatagaaatgtggaaactgaagataaaaaaaattaggtttcagaagaaaactatactacacctgttattagattctagccctaaacattgtttttgaggtttttattatttacctgcaatttggtctaaattctgaattatttcctgactacaagtatccaaggaataaatgggttttctttttctttatgatagttttagttggcttctaatgcaacaacaatttttattgtaatcctgtgtgcattctattcctactattcaaattattaatgttatagatctttcattgtagtacttctgaattaaccaaaatcacagtattctgaagatgattctacaaagcctgctgtttctacaaaggctgctgatgatttctacaaagcctgctgtagtgttgctgtggcctctgcttaaaaaagtagaaaacacattgatgcagcatgttcaccccaacctccctgcctaaaggctcagggaccatcttggaagaggaaggcgcgtgagattgtaagagccgaattagggggatggagtgtggagaataaggacacttcatcttggatgctcacctgccaaattgacttctgatgaaagccagctccagaaatgtgcctacagttactactttcacctaaaccctgcccttagtcaaatccttctcttcttctaagcaatcaacttcaattccttgtataacccacagtataaaagggcttttataccattctatcctattgcatgtaagccttgggtctgggaggtaacagtgtgggattccaccatctcatctccctgccacccaaacatgcctgctcttctttaagcaatattaaatgtttgtacttcagaaatttgatttgtcagcctcttcttcagactctcagcttctttggcctttgggagtaaatttgcataggcctgctcaaaacaggatgttctgggggtttgggggtgttgttttgttttgttttttgttttgtttagagacagggtctcactctgtcacccaggttggagtgcagtggtgcaatcatggcacactgcagcctcaaactcctaggctcaagcaatccccccaccttggcctcccaaagttctgggattacaagcataagccaccatgcccagccctggacttttctttaaagacatttacacagtgtaggaattactgtgggtgcactgctcaggtccccttctccaggatgctcattcctacctcatagatgattttcctgcagagatttgacctcagctgaagggcagtcacctggtccaggtggttgctattcacctccttcctgagaacagccaacagccagggacacgctagcacagagatataagagcgaccaaggtgaggccccttctgtgctgcggtgcatgctccagagcctccctgggatcagacttaagagggtctccagccagatctggtcttcgctgctttcctcgagctccccagcgcactcctgcaatgcatcttttttttttttttttttttttttgagacggagtttcactcttgttgcccaggctggaatgcaatggcgcaatctcagctcaccacaacctctgcctcgcgggttcaagtgattctccttcctcagcctcccaagtacctgggattacaggcatgcaccaccacgcccagctaattttgtatttttagtagaaacgggtttctccatgttggtcaggctggtttcgaactcctgacctcagttgatcctcctgcctcagccttccaaagtgctgggattacaggtgtgagccactgtgcctggcccaatgcacctcttgaatcacctcctcatgctttgcttttagagaacatgatccccaacatgtgattccagcaaagattctagaaagccaaccgtgacaatcacttctgggtttagatgacccccccccaccacaagatggcagtgagcacctcatcacagaggtgctgatggtctgcagcaccgcgccaggccagaacgtgccttttacagaagaaaataacccagtagctgactaggatggtgaggagggctggtgagcactgcggtagtgagagggacactagcatcactgagatgcaagtgatggtcatttttcataggtcaaagctcaaagcaggggacagttacagggcagggcttcatagcaccagtgtgatgaaagtatctgggagtggctaaggccagcactatgccatgggaagcaaggtgggcctgaggaggaggcagcagcgtcagcctgcaacaagtgggggctgccctgcagagacctaagagtcatgttatagagcacagtgtctgtaaggccaagaagtgtggacagccaagtgtgtcaattactagacatactcaagaggagcaggaagggcagggcatggtggctcatgcctgtaatcccagctacttgggagactgaggaaggagaatcgcttgaacccgggaggtgaaaattgcaatgagccgagatttcgccactgcactccagcctgtgtgatgggagcgggactccatctcaaaacaaaaaaagaaaaaggaaaaagaaaaaaagaaaaacctaggtatacttctcaagcaaataaaaataatcaaaaccaatatcatgcccgggcacaaatttcatatatataacagatttaaatatatgagggtgattatcctctcatatctccatttttttttgtttttccatttttttctttactaaaaaaagttaatgccaatgacacacaatttttttttttttttttttttttgagatggagtctcacttcttcgccctggctggagtgcaatggcgtgatctcgactcactgcaaagtctgcctcctgggttcaagcaattctcctgcctcagcctcccaagtagctgggaccacaggagtgagccaccacacccagctaatttttgtatttttaatagagacggggtttcaccatattggccaggctggtctcaaactcctgatctcaaataatctgcccgcctcggcctcccaagattctgggattataggcgttgagccactgcgccccgcctatgtatgattttttttttaattttattttcataagtttttggggaacaggtggtattttgttacatgagtaatttctttagttgtgatttgtgagattttggttcacccatcaactgagaagtatacactgaacccaatttgtggtcttttatccctcacccccttcccaccctttcccccggagtccctgaagtccattgtatcattcttatgcctttgcatcttcatagcttagctcttgaacccttactttctgtttgagggagaagacatatcatctacaagtagatactgtgtaaacattccattgcatgactatcccataacttatttattatttgtgtttggttatttgctgctatgtaacaaccccactcccaactaaatggtgtgacaattccatgattctgtggatcaaaaattctgaaaagtcaaacccaaggagttttgtctctgctccatgatgctaaagcctccgcaggggtgaggcgaatggctcagggtgactgaaaagctcagggttggaacagctggggatgaggcctctatgtataagatgattcttcactcacaggtctgaaactatggtggggacagccagaaggctcggctcagctgggacagtcacctgagccctacacatgacctctccaacatggtgatcctgaagcagttgggtttcttacacagcatcacacttttcttttttttttttttttttgagatgaaatattgctctatcacccaggctggagtgcagtggcacgatctcagctcactgcagcctccgcctaccaggttcaagcgattctcctgctccagcctcccaagttgctgggattgcaggcgcctgccaccaagcccagctaatttttgtatttttagtagagacggggtttcaccttgttggccaggctagtcttgacctcttgacctcaggcgatccgcctgcctcggcctcccaaagtgctgggattacaggcatgagccaccgcgcccggccaaagctcacacttcttatgattcagccttagatgtcacatcagttcattttccccacacttattagtgttagaagtcacaagcccacccatactcaggggactggcacacagaccccactctcaatggaaggggtgggacaccaccattcctgctgatgggcatttgggtaacttcctgtttgaagctattaagattgggctgctgtggccgggcgcagtggctcacgcctctaatcccagcactttgggaggccgaggcgggcggatcacgaagtcaggagatcgagaccatcctggctaacacggtgaaaccccgtctttactaaaaataccaaaaaaaaaaaaaattagctgggcatggtagcgggcgcctgtagtcccagctactcgggaggctgaggcaggagaacggcgtgaacccgggaggcggagcttgcagtgagccgagattgtgccactgcactccagcctaggcgacagagcaagactccgtctccaaaaaaaaaaaaaaagattgggctgctgtgactattctagtaggtgtctttggtgagcgcctacacgtgtttctctttttctctttagtatatgcccaggaggggaactgctggctcccagataccgtatgttcagggtcacacacacttccacagggttttccaaagcccttgtaccagcacgcactcccagcacctgtgtgactgctccagctgtcccacagtctcatcagttctattgctgatattttcattttagcttaagttatatttaataggaaaattaccgttgcctctgccccccgttcctgcctgtaggagtttctcgtagctgttgctacaggtggccacaaatctgtcacttaaacccacacaaattgatgtccttatggctttggagtcagaagtgtcaactgaaggtactagcagggctgtactgacctggtggcctcagggagcatctgtgctgcttctccaccttctagaggctgctgcatccctcgctccagccccttcctgacaccactcaccctcctacttctgttatcacatcctcaccttctctgtgttcagggctccctctgtctctctcttgcaagcacacttgggattccattgagggccacccacataacccaggagaatttctccacctcaatatccttaacaactgcagagcccttttgccataaaagttaccattcacgggttccagggattgtgacatgggtagctttaggagtgattattcctgcctgtctcccgctcaccagaacttggactttctctctcaacaggagccccctgtgtgggaatagcctgtctcaacgacgccctctataaggacctgcttcctcaaaggacctcatagtcgggtcctgcccctcagtgtccagtctgccttggctggaggggctgcaggggtgtgttggcgccacctggtggagacagggcatcacagcaggtgggagcccagtagaagcacaaccaaaacatgggtaatgtttaaaattttctggctaagcgctgtggctcacgcctgtaattccagcactttgggaggccgaggtgggtggatcacatgaggacgggagtttgagaccagcctggccaacatggtgaaacatcccctctactaaaaaatacagaaaaattagctggacatgtggcgcgctcctgtaatcccagctactcgagaggctgagacacgagaatcgcttcaaccccggaggggttgccgagatcgcgccactgcactccaggctgggcgatagagcgagactctgtctcaaaaaaaaaaaaagaagaggggaggcgaggggaggggaggggaaaagggggaatttgtttggagctgagacatccatcttctcctgacctcagatatttgcactcctggttatgaagccttcacacttggactgaatacaccaccagctttcccgatttccagcgtgcaaatggcagatcgtgagacttctcagcttccataattacatgagccaatttatatatataaattgggtcctccagaaaaacagaataaattatatatataattatacgcataacttaattaaattatacgtataacttagctatatatataatttattctgtttttctgaagaaccctactgacacaaatgttgagcatcttttcatgtgcttattggcttaataacttgtacatcttctttggggaaatgtctattcaagttctttgcccattttgtaactgaactattaatatttgtctttacattgttgagttgtaaaagttccttatatattctagatactagagccttatcagatatatttctgcaactattttctcctaatatataggttgtgtttttattttctttttctttttttttttattgagacagtctcactctgtcacccaggctggagtgcagtggcatgatcttggctcactgcagactcgacctgccaggctcaagcaattctcccacttcagcctcctgagtagctgaggttataggcacttgccatcgcacccagctaatttttgtattttttagtagagccgaggtttcgccatgttgcctaggttggtcttgaactccctgcctcaaagcgatctgtcagcctcagtctccctaagtgctggaagtacaggtgtgagccacagtgcccggccatctattttcaatagtgttttttgatgtacacaggtttggaattttgataatgttcaattcatccatttttttttttttttttttggttctttctactggaccaccactcttgagccctctaatccaacctccacgcggcagccagagggagctctctaaatgtaattactctttccctgctccacctgctcaaaacagtgtcacatttgtgatttaaaacagtatttctcaaacctaatttgcaaacaaagcaggtggaactcttcttgtatgcacagcatctgatttggttggtctggcatgggtctgggagtgagcacacctaccaagcggctgctggggtaacttgcgttttccactgatgatttcagcaatgtttccggtcccacatgctcctccagaaccttgtactcccccatgaaaaggtggagtccatttccccttcctttatttatttttttgagacgaagtttcactcttgttgcccaggctggagcgcaatggcgtgatctcagctcaccgcaacctccgcctcctgggttcaagcaatgcttctacctcagcctcccgagtagctgggattacaggtatgtgccaccacgcccagctaattttgtatttttagtagagacggggtttctccatgtcggccaggctggtctcaaactcccgacctcaggtgatccgcccgcctcagcctcccaaagtgctgggattacaggcgggagccaccgcgcccggctatttccccttcctttgaacctgatcaggacttgacgatggcatcaacatggtgagagtgaccctgcatggcttatgaggctgggttacacaaggcgatgttgcttctgactggctccctctcaggatacatgcccttggaacccatcctctaagctccttgggagcccaacttagcccatgtggagacaagacagggagagaaacagaggcacccccagccctcagccagcatcaaccgccagacaggagagcaaatgcgccaacaatgattccagctgaagcctcagacagcgtggagcagagatgagggatccctgcagattgcagatgcgtgagcaaaatgcatgctgtcactgttttgaaacaacaatgtctgggggctgtttgttatgcagcaatagacagctgtaacaatgctgttactgctgtattccatgaatgactgcactttgagtagcagggggctagatcactagataagccccatggcttctgtgtatgctatttttctacttttatatccttttcattcactttttttttttttttttttgagacagagtctcactctgttgcccaggtgggagtgcagtggtgcaatcttggcggactgcaacctccacttcccgggttcaagcaattattgtgcctcagcctcctgagtagctgcgactatagatgcacccccatgcctggctagtttccgtatttttagtagagacggggttttgccatgttggccaggctgatctcagactcctgacctcaggtgatccacccaccttggcctcccaaagtgctgggattacaggcgtgaaccactgcacccagcctcattcactttctttacttggctcatttttccttgttgcctcaattctcctctaagatcactttcctgacatttcagcctgggcctgttgccttctctgggtcccctccgcctcctgtgcctcccccatctcagccttgatccctcagattatacttcctctgtccccaccctgaccatcttggctgtccctggatagggatgggtatcttctcccactggtctgggagatctggaaggacaggcctggaaaagacttggtcactgctggaaggagctcagttagtgtggtgctgaggacagtacgggtgaggctggccccttcacccaaactcccactctcttccatagatttcacctctgtggcccaggccataggattagggcaactccccttaaacatcgagtccatcctccaagctgtccttttttttttttttttttttttttttgagacagagtctcgctctgttgcccaggctggagtgcagtggcgcgatctcggctcactgcaagctccacctccagggttcactccattctcctgcctcagcctcccgagtagctgggactacaggagcctgccaccacacccggctaattttttgtatttttagttgagacggggtttcaccgtgttagtcaggatggtctcgatctcctgacctcgtgatccgcccgcctcggcctcccaaagtgctgggattacaggcgtgagccatcgcgcccggcctcatgctgttcttgaatagtgagcacctgttacaagtcgccccaccagcctctcacttgtacccccctcatctctttctccccaagagacagaggaccctggcacttgtgaagcatgacccagaccctggggccatggcatccaacatcctcattccccatgacccctactgtctagatgtagctgccaagagacccccagactccccgggcctctgtctagagtgccaagacagagagagaatgccctgccgcttgcatgctttgtggggtgtccttcccccttccctggctgctaggcgtgacttcaacgttctccccaacccccaaacagcagcactgacaccagctgcagacctggctcaggttagctaatgaggaccaggctggggatggagcctgaacccctaaaccccagtcctgtaccccaccctaatcctggggtctccactggacaaaacgaagcagcttggtttttcgttgttattgtttttgagatagagtatctctctgtctcccaggttggagtgcagtggcgtgatctcagctcactgcagcctccgcctcccgggttcaagtgattcttgtgccgcagcctccccagtagctgggattacaggcgcgtgccaccacacccagctaatttttgtatttttagtagagacagggtttcaccatgttggccaggctggtctgaaactcctgacctcaagtgatttcccagcctcggcctcccaaagtggaagcggcttatttttaaggagaaaactcccgtggaaaggaatcagcacctcctctgtcaacatttcacttctctgaaaagactctcacttccaacagaaagtgctttgtaacacaacaatgaggctgggcgaggtggctcatgcctgtaatcccagcactttgggaagctgaggcgagtggatcacgaggtcagaagttcgagaccagcctgaccaatatggtgaaaccccgtctctactaaaaatacaaaaattagttccgtgtggtggcgtgagcctgtaatcccagctactcaggaggctgaggcaggagaatggcttgaacccaggagatggaggttgcaatgagccgagatcacgccactgcactccagcctgggcaacagagtgagactccgtctcaaaaaaaaaaaaaaaagaatgagaacatatggacacagggaggggaacaatacacacaaacaaaatttagaaacaggtgaaaataattttagtaatatttttactaatactgatatgctcaaaatattattatttcaataagtaatctaaaaattattgagatgtcttatgttcttttcatcatactaagcctttaatatttggtgtgtattttacactcacagcacatctcaatttgcagtccccatgtttcaagcactaaataaccatgtgtgtccggtggctaccatactggacagcgttgatctgaaatcgcatctgtatgcatcaccagcatatttgcagagatccccatctcagcagcacacctgaggctcatctgcgaaagcacctgcaacttctctacaacctcccacatcacctccaaacacatcctcatgtcatctgcaaacacacccatagctcacaggccaatgcctaaatatcattgcaggcaccttcagagaaagcacttactaaaggggtatacttgattccacatctgctttgacctgcaaatctcccttctcctttacatacatttgcatctcatttgtatgtcaatctaaatccactggcagagcctcagatcatcatctcaaagtcaggtggatgtggggctgggcaggcctccaggtgttcctcctcctgcttcctctggggctcttgatcctcctcctcttccttgctgctctcctcctcctcctccaatatggtgaccagttcctcccgcagcgcccccatctccagccccaggctgcacagctgtcccagcagctggacatccactcggcgcaggttcccctgccagtaggaaggggacgtcacagggatgccaccccagagagcaaggggtctctccaggacctgggtgagagcaggtcccaactcatgtcctggccacagcgcctgggcagggtcctcactgtgcccatggaccctaactgccttcctgcttctcagagtgtctcttgatctctaactcttctctttgtctctccatttcattgtccctgacttctctctctctgtctcctccctctcttatctatatctgtccctgtttccctttgtctctgtccccatttattttttgtctttccatgcccctgtctctctgtctttatgtgttgccatttctctgcccctgcctttggctctctttctctcgcttgccctctctctgccctccccaactttctcaaattcagtctgtctctccatctctgttcctgctctccgtctctgcttcccacctctgtccctctcttttgggatctccctgtccccacctctgttcccgtccctcactctatgtctgtctctcggtgtctgtacatgcctctcatgtctctgcttctatctctcagattctgtttttcgatctctggccttctctatttttgttcatttccattcattctcatttcctctctttctctttcccttccaaacccctcactcaccagctcctccctgatccacagcagactatcgcaggcacctccagtgtctgcccctgcagtcctgagggtctgaccagggatttccactggggagacctccctcagggcctgggggggtgggcccagccccggaggcaccagtccagcctgattcagctgcctccacagttccatcgtctctgagctatggctgcaaggagcaggaagtagcaaggtccagggtggcctggtcccctggggagctgtgtgcgtggtggagagtaaagggcagagggagtgggatgggggttcctgggaaaggtatcccaaagtccactcttcagagagaatcagctggccttgtgcttttctttttccttctgaagtctaacctcaactctgctcacagggttcaaacatagcctcttgcagaggtctaactccacccttccctgcctgtctcaggcctgacccctcaggggcgctcagtgtctgtagatgcctggcaccctctgtccttccacctgccccccaccaccacttctccagcctctcctcagcctccatttgacctctggcttgcccatagcttggtccttgcttgtcctcttggcacgggtcatcctagggctttcccaccagtgtgcctttgggggcaggaatggctcccaggggcaccaagacagcaatcccttagctggagtgcctgtgtccaggctgctggcctagggccaagcagccaattctgctgaccctggacttgcctatgggtatattatccctgttgagggtgagggcttctgctgtggaaaagtctgggaagcactgcaggcctctctcggccttggacccttccttcagacccaaggtgcatatatatacatatatataatggtagatcacgaggtcaggagatcaagaccatcctggccacatggtgaaaccccgtctctagtaaaacacaaaaaattagccgggcatgctgccgcgtgcctgtagtcccagctactcgggaggctgaggcaggagaatggtgtgaacccaggaggtggaggttgcagtaagccaagatcacgccactgcattccagcctggcgacagagcaagactccatcttaaaataaacaaatgaacaatatatatatatatgtattttgttttttgagacagagtctcgctctgtcatccaggctggactgcagtggtgcaatcttggctcactgcaacctccgcctcccgggttcaagcgattcccctgcctcagcctcctgaacagctggggttacaggtgcacgccaccacacctggcgaatttttgtatgtttagtggagacggggtttcaccatgttagccaggctggtctcaaacccctgacctcaggtgatctgcccacctcggcctcccaaagtgctgggattacaggcgtgagccaacgcgcccagccccaagtcccttttaccatagaaagtaacatagtcacagtgcccagggattcacaggtatggggagagggttcgttattcagctgccacacccaccttcctaaacctgctgcccttccagtttcctcacgtgcacagccacgcccgtctgcttttagtttctcaatctgttggcttaaccttcaaaacaggcccaggatttgagcacttctcaccattccctctgccccatccccattcatctcttgcctagactgctacagcagcctcttttactggtcccctgcatccacccttgccctctaaggcaagggtccccagtccctgggccaaggaccagtaccagcccctcgcctgctaggaactgggccgcacagcaagagatgagcagcgggtaagtgagcattaccgcctgagctccgcctcctgtcacatcagcagtggcattagattctcataggaggcaaaccctattgtgaactgtgcgtgcgggggatctaggttgcctgctccttatgagaatctaatgcctgatgatctcaggtggaacagtttcatcccaaaaccatccccaccccacccccgacccccagtctatggaaaaattgtcctccacgaaaccagtccctggtaacaaaacggttagggaccgctgctctaaggtacattctccacctggcagaaataatctttacaaaatgtaaatccgattttgacactcccttcttcccactgtgaatagaataaaaccctaccaggcctgcaccgtcagcccctgcccacctctcaacccagtctcctatctctgtctgcaagctggttcccacctcaaggcctctctgctctagaggctacctctccctgcagcgcttttcccctagatctttgaatggctctttccttatcattcacttctacttcaatgtcacctcttcagagaggcctttgctgatggccctacacccagtcacttttttttatctgcttctcatcaaaattgccttgctgattcctttgtttcttattcatcctctcccacatccatcctctcccagcccagaatgttgacttcctgagagagggactgggtctgtcctgctcaccatggtaacctcggcatctagaacagtgcctgccatcacgtggtaggtgctcagtaaatattcttggaactaatgaatgaataattctatccacaagacttcacaatggctcttcatgctgcgatctagctttcaactccaaactggtcttgagatctcacctcagtctctaaccttgacatctaacctcttcacccactctcttacctgaccctaatttttaaaaatgacgtggtcagcttttcagccccctcattccctgtttttaggaggtagtgagtggaagctggaagaataagaaagcttggggagactgcaattgcagtcaggaaagaaaggtactctgccgggaagaacaccccatcttctcctagggaaagattgtggagtcctggggtttgttttgtttttcaattttttgttttaagagacagcgtctcgctctgtcacccaggctggagtgcagtggcgcaatcacagctcactgcaacttcgacctccccggctcaagtgatccccccgcctcagcctcgtgagtagctgggaccacaggcgtgcaccaccacgcccggctaacattttattttttgtggatataaggttgccctatttctttgtggagataaaggctcccctatgttgcccaggctggtctcgaactcctggcttcaagcgatgctttcgcctcggcctccacaaagtgctgggttcacaggtgcgtgagcccgacctgtgtctcgttttgaagctcagggagagggcgctgtgagcaatccctaaaccctttaagagtaaaaagtgcgtgcacctttaagaggacggttagaaaacgcggggcgtggccacaggagaataagttcgcgctgaaccaggagcgtgggataagaccggccccttccggttacgaaaccttagcaagatggcggctccctgggcgtccctgcgcctggtcgcccccatgtggaatgggcgtatcaggggcatccatcgcctgggtgcggcagtggccccagagggcaatcagaagaagaaaaggacaatactccagttcctgaccaactatttctacgatgtggaggctctgagggattacttgctccaaagggagatgtacaaggtgcatgagaaaaatcgatcttacacctggctggagaagcaacatggtccatacggcgcaggtgcctttttcatcctgaagcagggaggcgcagtcaagtttcgagacaaggagtggatcaggccagataagtatggccatttctctcaggagttctggaatttctgtgaagtgcctgtcgaagctgtggatgccggtgactgtgacatcaactacgagggcctggataacctccgaacctccgcaggctggacatctcggacctccctgccgtgtccaaccctggcctcactcagatattggtggaggagatgctgcccaattgcgaggttgtgggagtcgactgggctgagggcctgaagtcagggccggaggagcagcctcgggacacagccagccctgtccctgcctagcctttagccctgtccccactcacgtggcttctcagcgggctgcatggaatgtctggtagctcaccacacttctggcttccatttgtcttcactcaacgtcagggtgggggagtggtgctggccaatcacaggagagagcgtgagttcccagtatttattcctggctgcccttggctaaaggtcacagctcctgtcaccctgtcaggcagccctttccatgcccctgttcaggcctggggaggtaaaggctcaggctgttagtagccgcagagagccacactcaccttgtcaggagactcttctcaaactgtccttatgtgagtgcactgccatttcttgcagggaccctgactgacacaggggctactactgacactttacagggatggttctcccccgtgcagggccgctgtgcccactgcaggacatgcagcatccttcgccccactccactcactaaaggccagcgcaccccaggccccatagtattgctggttatggatttattgactttatgttccaaattcagctttttcagttggctgttttttgaaaggggataagctttgtcagtagagggcaccgaacaggcattataggaggaaaggcgcctccttcgtggttcttgttggcctccactgaggcacctctctgggaataacgttccccagcaccccaaatggatttccagtcaattcagaagcattttaccagtgaagccctcattattccagttcactgttaaagccagtaattctctatattaaactttccctgttcggtttatggagtataaaccgaacagggtcttgggaagggacagtgtctaagtgtctgggtgccatccagagcatttggcaggggcagctgcaggatgagtgtgttcccaggggagtgagagcagcagctatatggcacttgtttgctactgccctctttttttctttttgccaaacctgaggtgactagtgtcacaggtggagcccatctcaca

SEQ ID NO: 735315 - DNA, 187923 bp, Homo sapiens
ctccaaggctgagggatgaggagacctgctgaggacccagggccttatctttccatcccactccataggtcccagtattgactgatgctgtcttcacctcctagcctcacttttaaccttctggcacccgcccaccactgtccagttcactattgaagccctgccgtccagtgctgcagagggaaaggatgttcttctactggcctgcaatatttcagaaactattcaagcctattattggcacaaggggaaaacggcagaagggagccctctcattgctggttatataacagacattcaagcaaatatcccaggggccgcatacagtggtcgagagacagtataccccaatggatccctgctgttccaaaacatcaccctggaggacgcaggatcctacaccctacgaaccataaatgccagttacgactctgaccaagcaactggccagctccacgtacaccgtgagtgattcccccatacctctgggtgctggcggtcagttctgcttcacacacatgagattgtcaggcctgggctgtgcctgcatccccctctgcattttgtcccgtgttgagatttgggcatttagtgcaggacacacacatggtaggtaaacttcaacagatcagaattcctttcctgcatccaggccctgcagacactgatggcgggggcgggggggcctcagcagggggaggtcagtctcagccaagcaccccatgccctccccatgaacctgaccctgagaaagaccctggagaactgggtcagggcctggcctgagggcgtcctgggaacctcacaaaagcccagcctcaggactcctgactccgtgtgaccccgggaagcctgtgtcagggctggggtgtggtctcctgggcagggcttactgggagcaaggatttaccagatgtctgcgggctgtggttcctgaagcttctcatcagtgagggctcagctcccagagtctcatctagacaaggacagagcctaccactttccctgggactcagcctggagagggcagggggacaggattactagggcattggccccctgaatgaggagcttaagagatgcccttgggcagtcagtggcccaggggtaggaacagaggggagaaaatgttcctggcagcttcttgtccaccggggatcatgcccaggggtgctctcccatggaggcaaataacagatgctgttgatgtgaacacctcctctgtgccaagcttcatgtcagatcctgtgaataatttaaagttcattcacagacaaagtggcaagcctcagaccattttccatttacatattgtatggaggggaaactgaggcacagagagatacagacaccggccacggtgggcagatcgcagctggcagagtcacatgagggctgtctgcagctgctgccacgtcctctccttcatccctggtgccttactaggtgtctgtggaccttagaacagccactggttcggatgttttcttcttaggtgtctacagctcggagggggagattctggtctggagagttatgagtaaatacagaattaatcagttttttcttaactaaatcacctgcctcaacaatcagtcagtgctggggaagttcaggcctcctcgctcaggtccacaccccgcatctctggacatgaaatggcttcgtgtgttttctgatgtgtgggtatcattccaacaggaggataaaggggaggactttgctttctctccccattcacaccctgcaccagccagggcccagtgtgagacacatactccgtagttctctcatgaaggagggagggaatgaatgaaggaatgatctataacctcttcagagacagagacctggatacaagatcctaggaggttctgggcccaacgtgagacacacactctgtagttctcttatgaaggagggagggattgaatgtaggaatgatctataacctcttcagagacagagatgtggatacaagatcctaggaggttctggccacacctgttttctgtccctctagagcctaagacccatgtctcattcatctggcccgtttctcctaaatctgcccctgggagctgagtctcatctgaccctggggctgcagggctgtgggaaggttttcaggggagggatcaggcttgcgggtagtcccacacgtttgccttacaccctggagctctacctggttctcactatgaatatcccataataatcccccctatcctttctggggagtagaaaaaaagtaaatatttaaaaatatgccagagcatctgttcttcttagcaagttcagatagttattagttagcaggaataaatcgttattttaccagagcctcacctgctgggggtttatgggagcctaactgactgaggggggtgggaaatatccaactccagccccctctagccatcatgtcccacctaaaggagagaaaaaactgagaggcacttgtgacattcacagcccagggcacagactctatccaggaccacagaacccctccctccccccactcaccaccgcatcactgaacgcctgctcacccaagttcctgttgcccagtacatcatgtcctggctttcaacaaaaactacaagacagactagaggcaaaaaaaaaaaaaaaaaaaatgcagttcgaaagacagaacaagcatcagaaccagatgcagatgtggcagggatgtggcagggatgttgaaattatcagaccaggaatttaaaacaactctggggccaggagcggtggctcatgcctgtaatcccagcatttgggaggccgaggcaggcagatcacctgaggtcaggagttcgataccagcctggccaacatggcaaaaccccgtctctactaaaaatacaaaaaattaggcaggcatggtggtgggtgcctgtaatcctagatactcggaaggctgaggcaggagaattgcttgaacctgtgaagcggaggttgcggtgagcctagattgtgccactgcactccagcctgggcaacagagcgagattccatctctaaaacaaacaaacaaaaaacaatactggctaatatgctaaaggctgcaatggaaagcatagacaatgtgcagaacagacggatgctgtgagcagagagatggacaggctaagaaagaataacaacagctactatatctatctatctatctatctatctatctatctatctatctatctatctatatatatgtatatatatgctagagatcaaactcactgtaacacctggatctcagagtggttgtgaggatgtttattaggagattaaagagattaaagcagagttatacacagggcgagagctcaactgatgctatcaactagtattcttatttttttgatgttgttattggcaataaaatcaggaacaatgcagtaaaaatttggttttatcatgtacgagttctgtgaccttccttgacttactgaggtactgtaagtctcagattctaactctgcagatggcggtgatgcccctctccctcaaggtgatgtgaggatgagatgagctgtaggtaggttggtgcccactgtgcctggcacatggaaggcccctgaaaatagtcaatgaacatcatccccgctcatcagcatggagttgacagtgagggctcgctctctgtgacaatcatggaatggaaaagaagaaacaagaggaagactgggcgcagtggctcatgcctgtaatcccagcactttgggaggccgaggcgggcagatcatctgaggtcaggagttcaagaccagcctggacaacatggcgaaatttcatctctactaaaaatataaaaattagcctggcatggtggcacaaacctgtaatcccagctacttgggaggctgaggcaagagaatcgcttgaacttgggagatggaggttgcagtgagccgagattgcgtcagtgcactccagtctgggtgacagagcaagactccatccaaaaaaaaaagaaaaagaaaaaagcaacagagggaagaggtgtgacatgagaggaagaagggatttaaaggtacaggagcagggcgaggtgcaagcacctgtgggagaatgtaggagttggtacatcccagtgtgtcaagtctgagacacagaaaatggtgcaaccgtggagagcaagggagtcagctatgaggacagcccaacagaccacactcaggctctggagcatttccttcctccctgactatgcccctgccctgcaatgccccttatggtttcccttggaacaaacttgggccttgtcccctttgccttcccctttctgcagaaaacaacgtcccaggccttcctgtgggggccgtcgctggcatcgtgactggggtcctggttggggtggctctggtggccgccctggtgtgttttctgcttctctccaggactggaaggtaccgcagcttttccccagcctcctcccacccctaggctgaccccagtcagggaggagggagaccccgccctgtattcagggccaggctttccgcatcctcccaaggaatccttccctctcattccatggctcctcccttgccagctgctgatcctaggctgcctcttcctttatgaatgtggcacagttaaggttgcacccctgagtgctgtcctagttccctaacacagcaaagccacagctgcctggagggaggaagggagggagggagggagggagataagacgggagtgctcagaacctggtaccttctgctgttcattgaatttacccacccagtgaggagggatttgcaggcttgagatccatggtgggggtcctgggcatggtcacgcagtggggagtggcaaagcctggacaggctgggtagggtcagcaccccatcgtgattgatgtccctgaggtgtgagatgggagaacctggacctcaggacctgctgtcctttatgtctcttgccaaggggtggagagagagaggacaaggccattgccccatttcagcatctccaggcctgaaaggagggtctggccatggcagggatactgagttctgggagaatatgatacatgctccttgcctccccatgcccccagctcccccagtgtcctgcacacacagccggccctgctttccctctggggccttgacccttcctctcaggcaaacgcaggtggtctgattccctccctgagtcctcagtccctttcctgggtccctgggtcaatgttctcctcacccggcatctgcctgggggggtccttcctctctggccaggacagacgtgactgcttaaggcctatcctcagctccccgtcctcggccgctcctaccacgaaactgatggagacaggaggccttcactccagtccttgaaaatggagtcccttccttgtcctttattctgcccctaaacctgtgatttctccctgcaccctcatgaataatcctgacctttcctagggccagcatccagcgtgacctcagggagcagccgcccccagcctccacccctggtgagtgtcccttcagcccaggtgtgggagcccctaggcctgccctacggtgtccactcctgccagtcaccccctgggggcctctgaccctttctttggggctgcaaggaggatgtcaggaaacatgacacaggggaccccgactgtcttgttcagactgatctgtgggctctgggtcgtgggtcacctcctcgacctcagctgctcaggtctcccctgggaagaggctccctctccctgattctctgggagctgaggacccctacactctcctgcaggaggggcccaggctctcctcccaccctgctgctcactcctgtctctgtccccaggccatggtccctctcacagatccaccttctcggtaagcctgttccctccccagcccttttctactggggtcccaacagtgcaggctcagggcagggggaccatcaaccccacagcacagcactgacccacctttccccagaacagtcaggtcaaagtgagtgcctccagccaggatccgggcctctctacagggccaggaccacccacgccatgtgctgacccctccccgggaccctctacacctgaggagaaccctggagtccagcaggtgcagaatggacactgggaccatcagtcagaggcccacattaacaagggtgcggggtgggcccagccaggacaggggtcagggtgttgtgtccacactgggaggctgagctcaggggcagagctggtcaatcctgaggggaaatgagtggaagtggaggcagggaagtaagtcctggccgatcagagacaggaaccttccaggctgggcttccgtgaccctccctccctgtcccctgacatctcctctctcccctgcccaggcccctctacccagccccagaacagccactcccatctatgaggtgagtgtgggccatggatgttctggtcccgcaggctccaggggacccaggatctgcccccaccagcacctggctgagctcagattcaggaaaatgcagtgaaaatgagaacaggtggtggtgagcagaggagggaggggcctgggaacagggaccccctgagcacagccaggttcagccccagagaagccctgggtgggcccagagcctgggagatgccagacactgttctgagaaggctacaggggttgaggcctcttctctgtttttacaggaattgctatactctgatgcaaacatttactgccagatcgaccacaaagcagatgtggtctcttaggttcctctgggagctgctcttgtgggttgatggagcgtccccaaagctcccagccctggggacggggaaggacatggagcctgagccagagaaccagctctgagtcctgaggagacacaggcctggggacagggagggatgggagtccctgctgaatatctggagaccctgacaggttgccctgggctctgggtgggccgggacaaaggcctctcatcaccacaggaagcgggggcttgcaaggaaagtgaatgggcctgtggcccacccggggtcaccaggaaaggatctgaataaagaggacccttcctctcattggctctttttctgctcacgggaacttagcagaaactcacctgaaactccgtgtccattctctcccgggtcacacagggaaaatatctccaccttgtctcaaccacagtctctcttccctgggaggcagaaataggggttgggagtcaggctggggtgggccctacacaggaaagggcaagattcacatgagccctgcccagccagccgagcgctcagctgtcctcacactaccccagggaccaaggccatgcacagccccagcctgggtccctctgtgaatgcatgtggggtctcaggagcacagaagatggggccatctgatgtccacaaaaggtgagcaatgcgggagcaaccatgggtggtataggttgcggctgtggcccctacgcagcctccagtgtcctgacccctgctgccctcttcacccaggccctggaggcccagtctatcactgtcctccacaaatgaacttacctgtccccaaatccaggatcctgtgtgcttatacctggccactaggttctcctctgtcccagtggctactgctcaggacatctttatccctggtggggcacagagaggggctgtcagagcaaccaagattaatacagacgcataattcagtccttgagcactacccaggactctggcccctcattgctcatcagttcccactttaccccctggcatggatctcactgagcaagccaactctttacacaggagcatccaggtcagaggtgcaggactcccccatctaaagctcatgcaggctcccatggcgatgggacaacctgtctgctcctctccctggcccacagccctatctcgcctgcagctcctccacacacctgggacagcagttctcagcccttccctgagggcccctggaagggtgatgatctcatataggttcacttgaaccaggtgccaccttcccacaagtgagctggtgcctgcactaaagcacagagccacagttcccaagagtgttctgccactgccacaggtcccaagagtgttctgccactgccacaggttgttcgtcctgagatgagaggtaagaaaacaacccgcaatgggttgttttatatcgggatttgcatcaggatttagctctaaatgacccctgatcccacctgcacacagcgtcagatgagacaaggtgaggcctctttagttttctgttgaggctgtgacaaattaccacaagcttagtgacatagaaacctgaaccaaagtgcccacatggctgtgttctttctagaggctccagggaagagtgcatttcctctccttttccacctcctagaggcctcctgcaaccttggctgtgtcctctttctccatcttcaaagccagcagcacagcatcttgaaactattctgtgccctgcttccatccccacatctccacctcctcccacctccctctctcacttaaaaggaaggagccttgtggttattttggacgcacctgggataaaccacaacaacctccccatctcatgatccttcctttaatctgtaaagtgtcctttaccacgtgacatgtccacagatctggggatgaggatgtacacatctttgagaggcccttgttctgtccatcactcctctcaaggccatcttctcatcatcgttcactacaaactacacatgggcacctggatgggttcatcatgactgtggcgtcagttcctgcattaacatccccagcaccctccagatcctgagagagggagacggagggctctccatgcccctagtacctctccaccttcttcttggtgacatgcttagttgctaagaataacagaaagcggaggtgactgaaagatcacaactcaccggcccttcaatagttcgtggacatcagcaccacggacagtgactcagtgaggctaatttccaggtggcagcagggagcatgcagataggagggaactgcaggaaaagctgcccattctattctatatgagaaagagtgtaagaaagaggaagctattacagggataatgctattcttctctaatccataaattgcgaaacctttgcatgtctggatatcatggtttttagcacatctgctgccactccctgcagggctgattgctgcatccaggatgtggtctcttggggggctcacagcctgctttggcctcatggtgagtctccctgcccctgacactcaggccactgtctctgcctacaacatggtgggaaccttccatgattaacgtctgattctctgtgcctgacctttgaagcacatccatcactcagcctggagcatccgctgagctcagcatcctgctcctccatccccagctgagcccttgaggagatgcttgagaggatctcctgggctcctctgtgagctcctccaggctgagccttgtgcttggtgtcagaggcctttgccatctgcttgttctttccataggcaaataatcctcctcagggacaagtggggcctgaagatctgtctgaatatctatctatctatctatctatctatctatctatctatctatctatcatctatctatatgtatgtatatatgagaatgctttattaggcaaaactgcatactatgaacatgctttaaaatgcaacaggatgagatgtgaagacataaagaacaagtgtgtagtgacacatggctatcagaacacactgaagaatccacaccgcggccgagagcagtggctcacgcctgtagtcccagcacttttggaggctgaggcaggcagatcacttgaggacaggtgttcgagaccagcctgaccaacatggtgaaaccccatctctactaaaaatacaaaaaatttagccgggcctggtggctcatgcctgtagtcctggctgttcgggaggctgaggcaggagaattgcctgaacctgggagacacaagttgcagtgagctgagatcgcaccactgcactccagcctgggagatagagtgaggctccatctaaaaacaaaacaaaacaaaaagaatccacactgcttccccgcttcactttacccagaaaaggaatgttctaggccacttcctcttcagcacacatccccagggaactaaaataggttcacagtcacccccatcttcctcattcccatcacctcttacccacagaggcatctctggtcctacagatccagccctgccttcaagaggcacaggtccaacccatccagtgtccctgctagtcacacacagcactcagggtacaatggagggcttctgtgctttggatgggaacaaaccccacctcacattcccacacctgagaagccaccagggtcctctctgtcctgtcctcacactcaatgtctgtcctgggtcacccttgtcatctctcctggaaataggcatggctcctgacaggtaggattgaggctttgtcttttcaggagtccctcccactctgagcacatgaaactgctcagctccatgcaaccctctctcaccaggggccttgttctctgggtccctgaatacctgggtccatgccatgtacattttaagaaaaatgacagtgactctcaccctgacatcctcacccaaggcacgtgtctgacaagaatcaccaggtgagatacctgtggctccacacacctgaggcttcactgcgcaggggtgtcctcatccctctcctcccacccctagggacagtaagcaccacaggctgccttggaccaccagctccccctcccagacacagcctcagatctatactgacatgctacatggagaggctctgatgaacagcaggtattaggaaatcccaccgaaccaggtgccacttgcggccccactcctcctcatatctgtgactgggacagacacacataacacacctctgttcaccgcccagcccccaaggtcaatcacagtctgcttctcccctagatccactgctccccatgtcttccgtcctcagctgcatcctgggtggcctccttgctgttcttgtaccccagaggcaggttccaacctttgtgatgttgcctgcaatgcccaaactttcccttccccttccccttcccttttcccctcccccttcccctccccttcccctccccacccctatcccttcgtcttcccttgtcttcccttcccttccctataaagccaaacatacccatccacctaccttgtggtcaaagtcatcagcctcctgctccactcagtgttctctgaccctgcatatggaggtggtggcccctcctagaacacccaccactcactgtcagccttgcgtggtaatcacagattttgcaggggttacctgtgttcaggtgtgtcacctgtggaaccagaactcttggaaggactggcagagggagctgcttaggatatctcagggctcctggcatctggtctaccacagggctattaacaacagcacttagggacaaggtggaggatggacggttaagagggtaaatatggatgatgtgtgggcaaagaataggacacaggaacacatgcagtactcaaataattatgccaagaaaggtgaggacatggagatggacattcccatatacttctgatgggactgcagtttagtccctacagcaacattgacctcatcatgtttaacgcgcacacgctctgaccactatcctacttctgaaggcctccctgtgctgtgagctctgagaaggccaagcttgcctgttctgtctctgctaaagccagagaccagccaatagcccagcacagggtacttcataaatacatgttgaaggaatgagctccaggaacagtactccacatggtagagatgtgtgtatgaggatgttcactgcagaaggtcatgtcaatgtgacaagtgacgagcagcctcaaatccagcaacaggggtgtgggtaaaagatcatagtgtagccatgcaatggaaccaatgaaaaaaccacaattagagcaaatccacatgtattaataaaggaggtgccctccatacatgctgcacctaacagaatgttgccaaataagaatgaaaaatgatgatatttgggctgtaaaaactagaagtcagctaaataagaatgcatcgaaagtatttgtgaatgcttacaattttataatgccttggcatccgttttggatggaagttggactttctcataccagaagcagggctcagtcacctttgaaatagtttccagttctccacctccttccagttcctcagtgtgattgatcagatatctgatttatacaactgcctcctggtgacctcctccctatgggacttccggatacagcccgtatgactgccccactgaccccacaccctgcctgctgcagtgaccacctctaattacctggatctcatgtctgcttgcattaaatccaccaattaaaactccctgaggacaatctgtttgaataatattctgtaccctaataaaggccttgacccatgggttccccctctgtcctccccatactgcccctgacctctgtgtgtgtgtgtgggtgtgggtgtatgtgtgtgtgtgtgtgtgtgtcctccagacagggcctgtatcccccaggacctgtaagtaataaatctttattttcatcttatgtctctcgcaatcattggcaagagctctgcatcttaaagatcgcaaatttaagaaattggtgtagtcggcacaatagagtacctcttctgtttagcacaagatatctcggagctgctgaggcttttaacatcctcgccggtgtggctgcctcactggtgaggccgttctgttcagtgcaattcagttgctccactgtgtgctgctgtgttgctgctgtagagtgctgccatgttgttctccccaaattgttaccgagtaggaacctgtaatgtgctcccaaggtggtctaccccatgagaagggggattctccatctagggcaagggctaggtgtgtttctggaatcctaatagggaaggcatccacagagggtgaactccactcctccttagagtgaggagtgacatttcccatttattttccccatggaggtgccatgtattgactttttctttcactgtcccaaggttgagccaaggtgagctatggagaccagggcaagataccatttctgttagcaaagcaaatgggtgacaacgtgtggagaagctgtggttctcctgatggatatagcagagtgccatttagtaaaatcttgtcaggaggctgcccctggttagaccggcagtgtctgtagtcactaaggtggatgcgaattttaggccctgggccatggataatccctgcagacacagccgtggcttcatgtgatggggcaatcccgggctagtggctcccttgtttctgcatttcttgctgtggttgcacaatcaacacctcaggggttgattgggtcaccttggaaagagaaacagctgcctaggaggctggtgcacatggaggccaccctcaattttattctgctaacaagttgtaagattaaaacaacagggggctttgggtaccatcaggaacttgtcaagtaaacatccaaagacagaaagaagaaaaagaaaaagacattaaccgtctagaaatacaagccattttaaagattttgcttaaaagatgcgcttgggctgggagcggtggctcacacctgtaatcccagcactttgggaggccaaggtgggtggatcgactgaggtcaggagttcaagaccagcctgaccaacatggtgaaacctcgcctctactaaaaatacaaaaaattagcagggcatggtggcaggtgcctgtaatcccagctacttgggtggagaatcgcttgaacccgggaggcagagacggcagtgagccaagatcgcaccactgtactccagtctgggcgacagagtgagacttcatctcaaaaaaaaaaaaaaaaaaaaaaaaaagacgggcttgtttcgtcgttgtggagtcatcccagagagaggctactccctagagtcactgaccacctttcctcctccatcttttcctcttatcattctagagacagaaaacaagaatctcagctttaggtggctaacctcaccccccaagaaaagaaactaccactttgattgactacaaatccaagaaaaataaaagagaaactttaaaaagtactgagcaaaccacaggtctagcaaacataatgctagccctaggttacttattcatttacaacaaacccctagatataggaggaaaaaataaaaggtaattaaatatatacacatacaatattttaatataaatatataataaatagttaaattatgtatgtataatatgtaactaaatcaaagtaaaatttcatactttgattctattggaaattcaaaattcatttattaacttatatattaaggaatttatgtaaaaaaagatttttaaaagggcaccaatttgcttttgtgtctctacaacataggatctaatttaactttacatttgctaaatacactaattgacaaatattcatggatttaatcaatactggggctcaaattgtagccacacgtgggaatcccataaatttaaacactctgtccctattatcttgagaagaaaactaaatataaaattgaaaaaaacaggtatgtctcaatttacctgtaactttgcctaaatttcccggagtcatatacccattgctgtaaaacattctctattggacataggtgctctgagacaataaataaaatagaagtgtttttggtacttagacattggcttgacaaaatgggatcccatgaaacctcagttaagatagtgaatacggcccaatgtgagttgaaatggggcctttaaggattaaaacttattacatgaaacctagtaagtaatggggtgattatccatactgcttctccatttcatagcccaattttgacagttgtcaaatctggaaaaaacaaacaaacaaacaaaaaaacccctgggaatctgttgcctcacagagacacaaagtagacatcaaaattgtatatctcagttccagttccaaaatggtggcatagaagcaagctggctttactccttcacacagaaaaccaaaaacaaatatacagcaccaaaattattaccagatatattccagaactcaaatatgaaaatgaaacagttttcagagccacagagaagtgaaaaaaactcccgacagatgacaaaagaatcagatttccccatctgtaatgtccctccctgccccattctgcctggtaccaggtgtgtggaaaattttaccccaactcatggtttctacactgggaaatgtaagatcaatgcgggcaaccagtttctgcacaatcctgggttccctgtccctgccttaacccacaagaagcattgtgagtgcccgaagggagaaatttccctgaggacagtcaaagagtggggaggcaggactaccatctccttccctggaaactctgctgtgtaactcagccaagggagacatgaaatcagactggtgtttcagcagctccatgttgtagtaggtttgtttcacaggtatcctgggcatggacatctagccagctttcccacactgccaggatatcccctttgggacctccctcagttaggaagggcacactctgatcatttactagggccaaggtaaaccctaaaggtaacttagagatgaaaaggaggtagtgacctagcagtaaagaactctaagaaaatctatccaataaaaatcaaaacaagccagacaaagactaaaataaataatgaatccttcaatgtaaagacctggacttacatccacaagaaacagtaagcaggtaaccatgatctccccacatggacaaagtgaggaacaagtgactgatcctgatgagatggtgatgtgtgagctctctaatcaagaattcaaaactgcagttttaaggaaactcaatgatcttcaagaaaacatggaaaagcagttcagaaatttatcagagaaatttaacgaagggattgaaataatttaaagaaaacaaacaggaatcttggaattgagaaatatatttgctgaacaggaaaatttattagagtctctcaacagcagaatggatcagaggaaagaatcaacccaaataagactcccccaaggcataaaataatcgaattctcaaaagtcaagggcaaagagaagattttaaaacagaaagagaaaagaagcaaatggcataaagaagctccaattctgtggcaacagattttcagtggaaatcatacagaccaggagggagtgacatgacattctcaaaatgctgaaaaaatattgacatttgagaatactttatccagtgaagttatccttcaatataaaggagagagaaagtttcctagacaaacaaaagctgagataattcacaccatcagactagtcttcctgtaaatactaaagggtaaatactaaatacttcaatgtgaaagtaaaaaaaaaaacactaacatgcaaaacaaccacaacaacaataacaacatttgaaggtataaaatccactggtgaaattaagtacgtagacaaacccagaatactcaaatagtaattgtggaaagtaatccaatcataactctagcatgagtctcaaaatataaatctatcaaaaacaataatacattttaggaggccaaggttggcagattccttgaggtcaagagttcaagaccagcctggtcaaaatggtgaaaccccatctctaccaaaaaatacaaaaatttgcagggtatggtagcacatgcctgtcgtttcagctatttgggaggctgaggcaggagaattgcttgaacccaggaggtggaggttgcagtgagctgagattgcactactgcactccagcctgggtgacagagggagactctgtcttaaaaaaaaatagctacctgtttggagaaaggtaatataaaatatgtaaatagagacaaagtcaaaatttgcaaaggatgaaattaaagagtagagtttttttggggggttttctgtttctattattttatttgtgatctaagataagttgttaccttttcttctcttgaagatactttgttatatctatgtttttggaagtcttatggtaactgcaacgcaaaaaatctatgatagatccactgaaaataaaaaacaatgacttaaaacatactaccagagacaatcaaccacaaggaagacagtaaaaaatgaagaaaggaagaggggagttacaaaacaaccagaaaacaggcaacaaagtggcagtagtaagttcttacttaaaaatattgaacactgaatataaatggactctattctccaattaaaaggcatagagtggctgaatgctgcctatatgctgcctacaagaaaccacttcatgtaaaaagatacaaatagactgaaagtgaagggggtggaaaaagatatttcatgcaagtggaaaccaaaagagagcaggagtagctatactgatatgagataaactacaaatcaaagactataaaaagagacaaagaaagtcactatgtaatgataaagcgctcagttcagcaagaggagatgccaattataaatatctatgcatccaacacttgagctcccaagtctcccaagtatttaaagcaaacaatagtggatctaaaaggagagatagactgaatacaatattaattaggggactttaacaccctgctctcagcaatggccagatctttcagacagaaaatcaacaaggaaacttcaaagttaaactacacactagatcaaataggcctaactggcatttacgggacatttcactaactatctaactgttacagaattcacattattttcatcagcacatagaacattcttcagaacagaccacatcttaagtcccaaaaccagtcagaataaattcaaaaaagtttatatcacatcaagcatttgttctgaccacaatggaataaaactacaataaatgaataactttctggacacatacaacctaccaagatggaagcatgaaaaggcagaaaaacccaacaaaccaacatgaaactgtaacaaaaggaaaacccaggaccgaatgacttcactgctgaattctaccaaacatttaataagaactaaaaccaattctactcaaaatgctttaaaaaattgaagaggatggaacactttcaaactcattctacaaggtcagcattatcctgataccaaaaccagacaaggacaggacaaaaacaaacaaacaaacaaacaaacaaacaaacaaaaaaacactacaggattgcttgaggccaggagtttgagatcagcctgggcaacatagtcagaaccaatctcttaaaaaaaaaaaaaaagaaaaaaattagccaggcatggtggcatgtgcctttagtcctagctactcgggaggctgaggtgagaggaccaattgagcccaggaggttgaggccgcagtgagccatgtttgtgtcactgtactccagcctggggaacagagcaagatgctctctcaaaaacaaaaagcaagctgggtgtggtggctcctgcctgtaatcacagcactttggaaggctgaggtgggagaactgcttaagcccaggagttcaagaccagtctggacaacatagggggactccatctctcaaaaacaaccaaccaaaacaaagccaaaaaagaacataggccaacatcactaacaaacatagatgtaaaagtcctcaataaaatattaacaaaccatgtttagaaacacatcaaaagagatcattcactatgattaagtgagattcatcccagggatgccagtatggctcaacatatgcaaatcaataaatgtgatccatcacattaaagagaaccaagaacaaaaaccatataatcactccagcaagtgcagaaaaggcatttaataaaagaatgggttgagggagtggagcccatagtcagagcagcagtggtctgggattttggaagtagaaagaagggcagcaccactggccaggaccaccagggaacacccccataggccctgggtgttgtgctccagggagggttccctctggagttattaatcttggtgtccactttgcccagctgcccctcacagggtcagggaggatgaagggaaagcttccttctaatgaaagttcagggactcacagttcctagagcctgtagggagaggaagatcttcgaggaagagcacctgggcattggggcgtttgagaggaagatctatgccaggtccaagtggacaacctgtggactctctctccagggacatacgggtatctgggaatctcctgtagcttaaagaggtaaagacctctccctttagcctgaggactggaggatgctggttcaggtgaatgagtcctgcaggggctggtacaggcctggagggtggtggtgtccagggccttgggttcacccttagcatgattcaggccgggcggtgtttcacatgagcaagagggcctgggttcattgcttcaggacaatggtgaaatctcatggtggaagaaatcttgtccttgccagtgcccagctttcatttggtcttggcccagagtgtcctccctagagaagactcttgtcccttcttcacactgcccttcagggatatgccagccttatgggataagatggggtggagactgtagatgtgggtgggaatctctccacagagtgctccttctctcagcggttgcaccttgtctcagggcttcagcttgaaatctgggatctccaagcccttccctccccagtcctggccaggaccacatgggcagatgcattgtgtgaagtgcatttcatttggggtgtcctctctgcatggcaccctcccgttgattctctttgcgcatgtcagagtgcaggcaccatccacacctcctgctggaggagggacggagctgttgactcctgagagctgatcatgtgttcccaccctcacacacaatcatggtccatcctctgagggacatgtgttgccaccactgtggagatggtgcaactgacagtaacaaacagtaaaatctggtactgaatgggaccttaagccaacaatgacaatgtcattccaaggtgtttcatttttattgattcaatgcaagtcacctgatttcattgactattcacaatagctcgataaagtaaatgcatcatcaccaccactttaaagaggaaaaaggtgcttgggcagtttgtgactactgtggtggctgctgcattgctctctggtaaagccaagtaggtggtgggtgcggcctctgggctgggatgatccaccctcctggtggtggcaggggagccaagctggagccatggcctgtgcagtggtagcagctgaactgaccgctgctgcaggatttgcaagctgttacattttgcgaagccatgaagcacataaaacctcaagtagaacaagtgtttcaaagtctaccaaaatctgccttcagagattattactacagaggtggatatgaacccaaaatgacaaaacgggaagcagcattaatactagataatgaatgaacactagtaatagtagggtaagccctactgccaataaagaaaaaaataagagatgctcattaacatgttatgctcttaaatcacgcagacaaaagagggtctccttatatagtagccacaatcaatgaagctaaagatttactgcaagatcaagctaaaaacagtaggtgtataatgaatttttaacttcatattagtttatgtatatgaatatcaagtttttataataaaatgcctccaaacaaagaatatttgatttagggtttaataacttctaagaggggactcagatgtttcctgtttcacagtcagtctgagagggtcatttttcctggagctgacctgggtggaggcctcacactgatactccccagcatcctctctcctgatggggtttatgctgagcatacagtggccctgggacagctccattctctccatgagtcacagacgctggtcatggaagatccactggataaggttccagagtcatctgtggggcaggtcaggatcacaacatccttttcttctgtgactctggtgttgctgactcagatggggtcggagccactgaccctgtggacaatcagtggaggtgctcaactgaaagtgggctgagggcacgtcttctcctccatccctgggtccttaaggtaactgtggaccccagaccaactgacacaggagctagaaagaaattatttaggaagttagtgagggtaagagcgtccttggcaaggtttcccctttaacaaaaagcagcccaagataattccttttctaacaaagagcagcctgaaaaattgagctacagatgtagatgagcaagatggaagcttgcacaggtgaattccagtaggtgtgccaatagaaaagggctgcctggaagccaggtatgttcaacatggagactccatcctcccttttctccattaccacatgtacagtaaaaaaccaggcaacatggcaccggccaggtagacaatccatctgcatgacaaaagatcagagtggggcagccagcaaatggcacagctggtctaaacaatctttcaccccctgtataaatcagacactgcctcctgaagctcatctataaaaccttctgcatttcactatggaagtggcaacccattttccccaggacccctctctctgtgcagagagctcttctctttctttcccctatgaaacttccactcttaacttcactctgggtgcctgcatcctagttttccatggccatgggacaatgaacctcgagtattaccccagatgaatgatgctgtttcacaatcactggttcagctcccttcttcttagggtttcacagctcggtggggagaataccacgcctcagtggtctggggagtgaggaacaaatgaagaattaatcagattttacttagaacgctatcacctgcctcaaccatcagatccatgttgggaatgtccaggcctcctctcttagatctatacccacttcactggacctgaaatcctgtgtttcccgatgtgttggtgtcactcctatgagaggataaaggagagaactttgctttctctccccactcacaccctgcacaagacagggcccaatatgagacacacactcgctcagtagttctctcatgaaggagggagggagtgacctcgagtgattctgccatctgtagtctgtgtaccctggccagtggctgtatcttcatatgcctcagtttcccctcagtaaaataggacacacaatgagaactaaaaataaaattctaattccccagtgaactgaaaggatggcctcttggccaagcggatcccagagttcctgatcatgacaggatgggaggttacacctcattacagcccctccctttggaagtttagaggtgacaactgactagcattaacgctaaaatcgagatcatgagactgacagaacagactctctgtggccataagataccaaattataaactcaacctaaggtcatgcaggcaagggctaagccacactttcctacatttaaagaataagctatgttctaacacagaattttctttctctctagcggctaaagtaacactagccttcgagataagcaatattgaaatgatcgcggctcatccaccaacactggctaactgacccctgttccaacagccacaactacacttcaattggacaggagactgatttcagtaactttctcctaataagagaccactgagcatggcctggttctgctggtatacagacacggtgcactgagtaccataatgcttgtttcatcttttgatgtataagacctaatttaatacatttaaatctgaattctccaccccaaagtgaacatggggtgcatgtagcatgcatgtttgttgatcacgcatgtgcgtgtacttcctttgtgagtatccatagctccacctataacctgttgaatatgtatacctggccaactcattcagcataaatctatcttccacattcccctcccttgaagtgcctgctattggtctctgctggaggctgcatcttctaccctggggaatggccagcctgcaggctgtaaccctgtgtaagaaataacctggttgggtgcagtggctcacacctgtaatcccagtggtttgggaggttgaagtggtagaatagtttgagctcaggagccagagactagcctgggcagcatagcaagatcctgtctcttaaaaaaattttagggaggagagtgaggatcagaaaaaatacctattggctattatgcttagtacttggatcatgaaataatctgtataccaaacccctgattacatatataacaaacctgcatgcgtatctttgaacctaagataaaagtttgttttaaaaactatctgggtgcagtggtgcatgcctatagttccagctactcgagactgaggtgtgaggagtgcttgagctcgggggattgaggctgcagtgaattatggtcccacctgtgagtagccacttcactcaaacctgggagacagagcaagaaccggtctctaaaaaaaaataaaaatagaaaaataaaatgaaaaatatatgaaataaagtctcctttccaaacgtacagatctccgatttttctgccaacaatgataaatggtcagtggcttgccatgttgtctgtgaattacttttaaaatattcacgatcacctgacctaaaggttggtaccaaggaaccgcctgaatacaccgtctctgattatttgcctccaacagagtgttccctgggcctgatctctggtggacaatgagctgctgggaacatcctctcttctctattcctcccctggggatgctgaccttcccttggagtctcctaagttccccagggcagtcggctaatgtcctagggagcttacctgtcttctccataccaagtctcatgtgaaggacgaggctttgcccttgcccagatgaggctctgggggctgagccctggctggctaccagctgcaagagccatggcccttggacagctggtaaatccttgttcccagtcagccctgcccaagatgcctcaacccagccccggcacaggcttcccagggtcacatggagtcaggatcctgggacaggggactggacaggggtttccagggctgagtttctgaacaggggcttcccaggggtcccctcactccaggatctgacatggtcctacaaggaacgtccatggggaggggacccaggagggggaactgacactgacctccccttactgagcctccccccaaccccatcagactgtccttcctctgtagcaagtgcctgcagggtctggatgcaggaaagaaattctgatctgtggaagtttgtctcccctgtgtgtgtcttgcactaaatgtccaaacccccaaatgggatgtaatgtagagggggacacaggcacagcccaggcctgaaaatcctgtgtgtgtgaagcagaactgacccccaacacccagagctcatgagacatcactgtgtacgtgaaactggccagttacttcttcattcacaagatctgtttttatgacttgtagggtgtaggatcctgtgtcattgttggtgacattctgtatcagcagacatgtattggggtatattgtctctcagcctctgtggcaggtcctggggtaattacttgagttcctagtacatatcctgtaattcccctttgtaccagttgtagccaagcctaaggcagattgtgggtgagtggaagaatctccttgccttctgcagcttcaacagtgacttgggcagtggtaggcaagttccagaaagttaaaagtgaggctaggagtggggagagagcatcagttaatactgggccctatgcattgaggtggaaagatggggccctaggtcctggacaggtctcttcatccctcagccttggagtgtgtgtgtgtgtgtgtgtgtgtgtgtgtgtgtgtgtgtgcgcgcgcgcgcgtgcgtgcgtgtcctactgggccaaggtcagcagcatgacctcccttccttcagtgcctctgaccttggcatttccctgtttggagtccttttccccaggggtctgcctggctccctccctactgccttcaggtcctgctcacattagggcatccttgggagaccccttccctgacacctctagagaccctgggtcttccctttctgacctttcgctgctgtgttccctccagggctcttgtcaatacttgacctcacattctagatacccttgcatgtctgtcttcctccctatgagagcatgagctctgtgagaacagggacttgtgtgatcttggttgcaccccagtgcctgggacaggctgcggactcctgtggatgagctcatgagtgttcccagggcccttcacaacgtgggatttattttccaatggctgaggttgttggctaagagctctgttggagttcaatcaggctggtgggaaaaatattagagatagttatagagatagacacaaatcttcttggaagaccaaaaagtttgcataactttggtaatagatctgactgaaggtggtccctttacctttagttaaacaaattaaagtagtaacaaaggaaggcagagtagtttgtctagccagcttgtttactcatgtgatcttaagactaaccattgatgtgccacaggtgcttaattgctttctacttgggaagtccacaatgtcaattaccctctaacggtgttgactcaagcctttgttaattaatcttactgaataaatatgagtctcactagctgatcaaggccatggtcacaactgtttataggactcagcagggagtctgtaagcggccctgacagactcagctggactggcaaagcaaaatatgtgtgtgtcagtgtacactattcacccgtcccccacagctggtgcccctatatgaggagtgctgccacagagctctgtttagtgtcccttgttttttttcttgagtattaccccaacttaaattgtgattattgtcatctgttttcaacattaactgctcagtgatgattcacttggaaaacattaacaatcgagattgtttcttcactaacaacctcagattatttagattttcctgttgtaatcccttcttcctgtttagtgtccaacagaagccctctgtccctctcaggtccccgttctctccaagaaaccccagccagtctctgtgctccctcctcccatccactcccagggagccctcccctcacctgtgagcagaagcgcctgccagggatgtgcactctgtgaggaggggctgagggaggccccatgggctctgctgtctgctttgtcctcctctgtggagaggagcttgggcttcagaaaataaggaggccagaaagtaaggaacaggctgagaaataatggggatgtgtcgaaaggtcacagatgccaacatctttgtcctatgcaatattatccataaaattacaggtttgagatatgcttaaattttcttctaacatgcattaaaataaacatataacttttaatagttatattaaattgtatttaatataaattaaatgctcttgtcagagctactgtgactgtcagctctgctgtccttcctctctctgtgctaagcctcctcccagggcagaagcacttcccagggccaggggtgggggcggggaaaggtaagtggcaatgaggatctgcacaggtagcctttccgcctcctcccctctcagtcctgcctccttgtcttcttttcctctttttctccaatctacatttcagttccttagaccacgctgtgagaagcaaggcttattgggacccccatcccttaacaggatgacctgtgctccccataagtgacctctgctgtgtctagggattggctctgtcagcacctcacagagagtccctggggcccccaaactcagtgttattttctctatgacacagaaacccctctgggtatgcaaggttttcctcatgttttctaatgtctgggaaggttggatttactcccagcagggaggtcacagagatgtccagggagtggggtcctagaaatggacaaatctagagctaaagcccaggtctacgattttcagttgtttttttctgcagtgctatgtgaccctaatttcctaggagtaactaaaatgcaaacctcagacatttgtagacattttatgatttttctctacagcttgtaccactgttattattatttgctttatgctttttcctaaataaatttactttacaaaacatccttgtcctagtagggtgcaggggctcacgtctgtgatctcagctgcttgagaggttgaggtgggtggattgcttgaggacgggaatttgagacaaaacatctttgtcctatgcaatattatccataaaattacaggtttgagatatgcttaaattttcttctaacatgtattaaaataaacatataacttttaatcatcatattaaattgtatttaatataaatttatatacaatacatttttatataataaattatatatataaatgtatatataatagtttttcttttttgagatggagtctggctctgtctcccaggctggagtgcagtggcacgatctcagctcactgcagcctccgccttctgggttcaaacgattctcctacctcagcctcccgagtagctgggattacaggcgcctgccgccacgcccagctaatttttgtacttttttagtagagatggggtttcgccatgttggccaggctggtctcaaacacctgacttcaggtgatatgccgcctcggcctcccaaagtgctgggattacaggcatgagccaccatgcctggcctatatattttatataattatataaagttttctataataaattttatataataatatataaaatggatatttatttaagataaagttattagttttatatatttacatatatttaggaataaatgtgttactgtgggagcccagtgcccaggcaggtagtcagtacatgatggttgtcattagggttaatactttggaattctggattttttcccaagagagtgtctacgctggaatattgggcttgtggctttctgctgatgtgcatgtgtgaagaagctacttccacttattaggacttgtgtatctgtctcgcagtttcactacctattttctcgtgatgttggtcaagtcgcctaacttttctgtgcctcatttacctaatttgtagaatatgggtaacagtacacaagtgtgagtgtgtatttcccaggactgaccactagagggcgtgaaggcaccggcacttactattacagcaatgggtgtagtagtgctcatggtcgtaaacatcattctcccatgaaaggaaccagggcttcctgggagaaataactgattccagggctggggccggaaagcacaagcggagcctggagcatctcgtgaggccagaaagtaaggagccggctgaaaaataatggagatctgtcgaaaggtcacagatgccaaccagaaggagctttgaatgaccaattttgagacaaaatgagcactataagaaataatgatagtaataaattccaacccataaatacccatgagttcctactaatataaataaataattgaatacataaatatataaggatgaagaaacagctttttcttacagcagaattccaattaatgaatgtagaaggaatgatcaaatagaaaatcactatttggctaacagcacagtcaattgtttgtaggcaagaattatcaatggactttaaatatgaatgggtaaaagtatgatgatgctacaactagtgagtaccaagggggaaaaaaaagtacgttgagaagaaacaggctacttccatattcccaaagtatcacttcaggagctacttattgattataatgggacaaatagtaacttacagtagagaaacctggcaacagagtctctccgaggtacaaaggctctcttcaggaaggaggtaaggggaaggaagaagaaaacactgtcctgcctcaattatttgctttccccattctcaagtgtacttcatagacattcaaagatatgtgttgatagtgtccacgatccacatggctctattatagtcatttattcacacatacattcagtgaggctttgagtgcctaatgtgtgcctgatatttgctagatggtggatgctgagaagatcaggtgtgctgctgtctctagggtgactgaatccacctgccccactttacagatgtggaaattaaagtgaaaaggatttataggattagttcactgtcacaaggtcactagccttaaagttacaggagtaaagcaagtttcctgacttgctagattttctgctgcaggtgctgacaatggtgagctccaataggagagaggacactcagagtgaagtgggagccctgaacaccctggattagccaagaggacatgccgggtccagctgtgaccgcacaaaggaccattggggatatttgtattctctttttcacttagagcttgaaatgaggaaaactaagtgcagaaaaccaagagtggaagatttttcacaaagcactggtaacatgcatcagaaaaccctgtgctgatgtctgtcacggtgtttctcactgaacggtaatagtctggctttgagtgtgttccctctacagcctggagttctgcgaggcagggaccaggtgtgattcatctttgtctctccagtgacagtacacagcaggctctgataaatatttcttacaaaataaaatggaataaaaagtagacatctgcacaggtgtgggatgactgagcagcagcagaagcaggaaaagtcagcgtccccagatcagctgatgtggtgttcggattctagataggggtgaggtgccaggatggggatgggggtcctgtggctctgctgccctgggggacacccctaggtttcacagtgcctgctgtggttgctgcactttgcttccccatgggaaagtgatcagagggtgtggggcttcaggtgaccccatgtgggaaatggccaagggaaggtggggtgggcggcacatggttttttttaaccaatatttgaaggtaggttgtatgaaaaggtgttaggcttatttcagcttatggggagtaggacagggattggtgagtgtgtatcaggtatattttggctcaggatggaaaagaactgtcacagtaacataaggtcttttgggaaattacatgtttactggcagagttcaggccagggctgggtgtctgaaaatacctgtcagggtcacttttatggttacaagggcagagcttggcttggaaccaggtttcttactaataccacatattaagtattataaaaactgtcctttgcaataggacattgctctatgatgcaggttgaggtccctctgtttaagtaattgtgggtggctgtgattctctcatctagtctgcgacttggacttcacctccatctgcagtccctctcctttgctgttgacactggtcagagttaagcgcatttactgacgatggtcacagggtggcagcactgcctctctggtattttctaaaacctcttcctggaactgagccagtctaagaggatgtcatgactaagaaaagggcactaatgaggtgaacagataattttttttttcttgtttctcctgtgaagtaacagagtggaggtgagcatggaataattgccttttagaaatggaagacaatggagagaagtgtttcgcaaaccttaatgtgttcacagatcccacacagatctttttattcaatacagattctgatttttctggtgaggcctgagattgtgcatgtctaaggagcttttggatgatgccattgctgctggttggcggaccacactttgagtagcaaggctcgaagatcatttagaggttaattctcactgcatctaatttatggatgaaaacaaaccaaggtccagagagagcatatacagcttgcctaacaaagccattccctaagtgcctgacttcttgcatttaaacccagggcttcagcctttgtccagttctcactccacacatcacacggtttgttcactgttgtgaacgacagttgtggcagcatctctttagtttaggaatccagagccccaatttcactaccctctttggtcttggctcatgctgtgacttcgaatagttttgcccttacttaaaatcttcagtggctcttttgtaatcacaagatcaagttcgaatatctctgtctagtgttcatggctttataacatatggtatctctttagtaaccttacctaacttccctgttttaaaattgtctcttgctgccatagccctccttgctccttcctgctccctaacaaactgtgttcacttctctctcagtggtagtgatgatggcatggcctctgatgttagactcatgtaacttctaatcccagatccaccaccaacattggcaagttgattcatctttctgaggataagcatcctcctctgaaataaacttagatggcggttgagaggggtaaataaaataacacacaaacccactctcatccctgagaccctcttcaaaactagcatataaaaatagctatttgaagaggttcagtgaaattcaaggtaacacagagaaggaattcagaatcctatcagataaatttaatagactgaaataatttttaaaaatcaggcagaaattctgtagctgaaaaattcaattgacaaaccgaagaatgcactaaatctttcaacagcagaattgatcaagcagaagaaagaatttgtgagcttgaagagataatatatgaaaactcagagtcagagagacaaaagaaaaaagaattaaaagaataatgcatgcctacaaggtttgattattaagctactcaaagagatacaagagaagggtgaaaaccaacataaagaaatgtaaaaaacaatcagaatataaatgaaaaattttctaaaatgctagctagtttttttttgagacaggctcttactctcatcacccatgctggagtgaagtggcacagtcatggctcactgcaggctcaacttcctgggctcagatgattctcccacattagccttccaagtagctaggactaaaggcgtgtgccaccaggccaggctaattttttgtatttttagtagagatggggttttgccatcttacccagggctggtcttgaactcctgggctcaagtgatccaggagattcactgccaaaaaggatataaccaagtcatatagtcataggttatctaaagtcaatgtgaaggcaagaattctaagagcagtgagacaaaagcatcaattaacttataaaggaaaacctatcagtctaacaccagatttctcatcagaaaccttacaaaccagaaggtattggggtcctaatcttttggcttcttaaacagaatagctctcagccaagaatcttgtgtagagtgaaattatatttcaaaatgaaagagagaaatacagtctttttcaggcaagcaaatgcttcaggatttgtcacggctagaccatcctacatggaatgttaaagggacttctaaatcacaaaacaaaagatttaaatagaacagaatagaacctcttgaaaccaaaaaattcaaatggcctataaaacaataacacaataagaaaacaaagtagataacgatcaacatgatgactggaacaaatattaacattgaatgtaaatgacctaacactccacttaaaagacacagattggcaagataaataaaaaatcacaaaccaaatatcagctgtcttcaagagactcacttaacatgtaaggattcttatagactcaaggtaaagagatgataaaagatattccatgcaaatggaaaccataagtgagaaggaatagctatccttatatcatataaaacagactttaagcaacaacagtaagaaaaagacaaataaggcaactatataatgataaaaggatcaatcaaacaagaagatattacaatcctaaatatatatgcacctaactttggagctcccacattcataaaacggttatgatgagacctaagaaaaaagatcaacacaaaacagtgagggtgtcctgggttttctttttattggacagcagtgtactagcctatcactttcccagtcaggggatttttggtctccccattcccctaccatgggttcatgccaaagtccatattttttattagtgtttggaattggattttttttttttgaggtggagtctcgctctgttgcctaggctggagtgtagtggcacgatctcggctcactaacctctgcctcctgggttcaagcaattcttctgcctcagcctcctgagtacctgggactacaggtgcatgccaccacacccagctaatttttgtatttttagtagaaacgagatttcaccatattgtccaggcttgtatagaactcctgacctcatgtgacagggaaacaggcactcagtgaacttcatgcgattgaggagttaatgataatgagagaagggctgtgaggggacagcactggggacaccagagcctgtgacgggctgagttgctgtgccttgggagatgcccttttgactgagccctgggaaggagggggtgtgggggcaggagctgcctgcagagggagtggcctcaggtgggcggccacctggctgcagggaagaggtgacagagttcgtgtgcagagcttggagggtgaggaggaggtgggttgaggtgaccttggtgagggtgaaccatggggggctgtgggccctgctgagggaggccagccagccctggacctacagggtggtttggtcttttttgtcccattcccagcatccactgagtggtgaaactctgcaggccagggaccatcccactggccagaaggagcgcacagtaggtgcccactcagtgcatgttgggctggacagaacctcactctgccccctgcccccagctttgggagctgcagcaaggtccctccccctagggatctccatgcctctgtctctgaggggtgagatggggagacttcaaagggccatctcagagtgtgggggatagagacgcagaagtgtgggggatagagggaggcctgggctctagacccaaaggaccttacacacctcctgagtcttttcaaatggtttcttctgttactttaaaaatgatgtaagtcatcatatttattgtaaatcccaggaatctaatcatgcgtaaaataaggtgtcttatccttgaccccaccccttccccaattaaatttccaggatgttaccactgtttgcagttggtgtgaatctctctttaataatactctgtttatctcacttgtcgttttacgccaaaatacccattgaattatattattgctgaagaccattcttttttttttttttttttttgagatggattcttgctctgttgcccaggctggagtgcaatggtgtgatctcggctcactgcaacctctgcctcctgggttcaagtgattctcctgcctcagcctcctgagtttctgggattacaggtgcacaccaccacacctggctaatttttgtatttttagtaaagacagggtttcaccatgttggtcaggctggtctcgaactcctgacctcatgatccaccctccttggcctcccaaaatgctgggattacaggcatgagccaccacacctgcccagaccattctgttctactgaatcatgtgtggtgggcacctcttatatcaatacatatggattttatcttgtgtttgttattggctcccctttttctcattgcatggctacactcaatgctttgtccacacccctgttcctgggttggaatcttgtgacagaaaatgaagtaacaaaggctaaagctttctaaagtggagtcaggagattgcaagacaattgcactttcaccagcaagagctcaaaccacagaatgttccaatagatttggataaacagctgaagtcagtattcaccagccttcaacatctcaactaggagaaccctaaaattaactaagcacatagaatggaatggacttgtgatttaggattccttctcagccaatgagctgcttctgaaaacaactttttgtggaaattacctgtaaagaaaaccctctcctgtgcttgtcttacagaacactagtcagggctgccctgattcagtggacccgaattgctattatttgtttcctaaacatatggtattttctgtgaccttcatctcaatcttttttttaagttactgggctgtttcccagttttcataatgacgagacattctgcagtgtttcatacacatgtcttttccccatgtggagtattgatccaggagctcattcagtcaacgcatgtttatgaagcatcctgtgccaggctgtgggctggtcactgtcttcagcagagagaggacaggcacagtcttgccttcacagagctcacagctcagggaggctcttagaagtgggatactggtcggagcatgtgcacattaaacatgatgaggtcaaggttgctatagggactaaaccacagtcccaccaagatcgcattgagttcctgtggtagaccagaggtcagggcccctaagatgtcctgagcagctccctctgctcagaagttttggttccacaggtgacacacctgagcacaggtgacccctgcagaacctgtgattaccacccaaagccaagagtgagtggtgggtgttctaggaggaaccgtcacctccatgggcagggttggggaagactgaggggagcaggtggctgatgactttggccagaaggtagggggatgggcaggtgtgcgctcatagggaagggaagagaagggagggcattgcaggcaacaacacaaaggttggaacctgccttcatggactgagaaaagcagggagtccacccaggctgcagctggggagggaagacatggggagcagtgggtctaggggagaagcagactgcgattgaccttggggactgggcagtgagcagaggtgtgttatgtgtgtctgtccccatcatagatatgaggaggggtgaggccgcgggtggcacctgggtcggtgggatttcatagtgcctgctgttccctagagcctctctgtatagagggtcagaatagatctgaggctgtggtctgggggaaggggctggtggtgcttaccatctctaggggtgggaggagagggatgaggatgcccctgagcagtgaagcctcaaggtgtgtggagccacagttgtctctcattagacatgtgttttgcgtgaggatgccagggcctggtggttattactgttgtcaagtttgcatgacaaggacccaggtatccagggatccagagcacagggcccctggtgaggggatgaggctcagatggggctgaccaggttcatgtggtcagagtgggagggactgatggagagacagagcctcaacccctcctgtcaggagctgtggctatgtccaggagagatgacaaggatgacccaggacattgagtgagtcattgagacattgaaggtgaggacagggcagagaggaccctggtgactgctgaaatgtaggatgtgaggagggctctgacccatgcaagttacaggacctccccacccccgagcccacagatgacccttaaattgggcatcctgagtgctgtgtgtgcccagcagggacactggataggctggacctgagtctctgtaagggcagcgctggtctgtaggaccagagtcttctctgtgggtgtgacgtgggcaggaattagcaagatgggggtgacaaggcttggcttggaggatctggtacagaagcccatgggcttggtcagctcagcttctcaggggctcagctggggctggaggagcaggatgctgtgctcagggcatgctccaggcagcgtgatgtgtgtggttccagggtcaggcacgggggtcaaaaattaaccatgaaaagttcccaccttctgtaggcagagaaaatggcctgattgtcagggtcagggagacttaccatgtggccaaagcaggctctcagcctcccagagaccacaccctgggtgcagcactcagctctgcagggtatggcaatagatgtgccaagaaccccaacatccagatgcatgcaaaaattttgcgatatataaaatagagcagatcaagtttccctgcaataacgttgttcctggttgtgtctttttcttgtaaactagacatggacatctttccagcagtctgttctcatctgccaccttcctgctgcagcacctcagaatgaacattcctgagacactgtccgtggtgctgacgaccaagagctatggaacagagtgtgatgtagaatcttctagttacctctgctctcctttcacttttaacaacagagcatcattaacaatgagaaggtggagaggtgttcaggatcttgaagtgacttctgtcttgctctcccataaccctgaagctgctgtagacattattgcagaaactgacaccacagtcaggatggccttgtccaggagcccatgtgcagtttgtagtgagcaaggatgagaaaatggtcttgaaaggggtgatggacagaacaggggcttttcaaaaatgtcacatcatcacccccagcatccgtgaatctgtcacatggtaagagaccttacagattaaatgaaggattatgagtttggaagattattgtagtttatccagatgggtccaacataatcacagaatcccttccttacaaatgagagagggaggtgggagagtcagagaaggaggaggagatgtggggatagatgcagaagacagagcggtgtcaagatgctgcactgctggctttgaagatggagaaagaggacacagccaaggatgcaggaggcctctaggaggtggaaaaggagaggaaacgcactctgccctggagcctccagaaagaacgcagccatgtgggcaccttggttcaagtttctgtgtcacttagcttgtgggaatttgtcacagcctcaacaggaacctacagaggagtcaccttgtgtgcaggtgggatccagggtcatttacagctaaatcctgatgtaaatattgcaggttgcttttcctacttcctatctcatggccaacaaccctggacaatggcagaacacccttggaaaccacggctctgtgctttagtggagggaccagcttgtttgtgggaaggtagcacctggtccaagtgaacctacatgagatcgttactctccccagggccctcagggaagggctgagaacagctggcccaggtgtgtggaggagctgcaggtgaggcagggctggaggggcctgtgggtccaggtagaggggcagacaggttgtcccatcgccatgggagcctgcacgagctttaggttggggaaccctgctcctctgacctggacgctcctgtgtggagaggaggcttgctcagtgagatccacgccagggggtaaattgggaactgatgggaaatgaggggctagagtcctgggtagtgcctgggaggaccttgctcaaggactgaattcttggtctgttcccaccttggttactctgacaacccctctctgtgtcccacggggataaagatctcctgagcagtggccattgggacagaggagaacctggtggccagagctaagcatccaggatcctggatttggggacaggcaagctcattgctgggggacagtgatagatacggcctccagggcctgggtgaagagagcaggagggctcaggacactggaggctgtgtggaggtcacacccacgatctgtaccacccatggatgctcctgcattgctcacctttgtgtggacatcagatggccccaacttttgcactcctgagacatctcatgcattcacagagggacccaggctggggctgtgcatggccttggtctctagggtagtgtgaggacagctgagcactcagctggctgggcaggactcctgcgaatcctgccctttcctgtgtagggtccaccccagcctgactcctaaccccctactcctgtctttccagggaagagagactggggttgagataaggtggagatatttttcctgtgtgacccaggagagaatggacatggagtttcaggtgagtttctgctaagttcccatgagcagaaaaagagccaatgagaggaagtttcccctttattcagatcctttccaggtgaccccgggtgggccataggcccattcactttccctgcaagcccccgcttcctgtggtgatgggaagccttcgccttggcccacccagagcccggggcagtctgttgaggtctctatatattcagcagggacccccatcccttcctgtccccaggcctgtgtctcctcaggactcagagctggttctctggctcaggctccatgtccttccccatccccagggctgggggcttcagggacgctccatcaacccacaggagcagctcccagaggaacctaagaagccacatctgctttgtggtcgatccagcagtaaatgtttgtgtcagagtgtagcaattccagtaaaaacagagaagaggtcttgacccctgaggccttctcagaacagggtctggcatctctctctgggcccacccagggctactctgggactgaacctggctgtgctcagggggttcctgctcccaggcccctccctcctctgctcaccacctcctgttattttcactgcagtttcctgaacttcagctcagccagatgccagtggggacagatcctgggtctccctggggcccaagggaccagaatatctgtggcccccactcacctcatagatgagagcagctgccctggtgctgggtaggggaatctgggcaggggagagaggggtgtcaggggacagggaaggattcctgctgtgtaggaattccagggctctcctcaggtgatggagggtcccagggtggggttagcacagggagtggatgatcctggccctgaacagaggcccagctcatggccagggcaggtctaaccttatccaagtcattctgggtagggtgggtttgtgctggggattgacagtccccctgccctgagcctgcacagctggggccccagtggaaatgggattgggaacggacagtcttacctaggagatggagctgtcagagggtccatggcctggggacagagacaaaagtgagcacgagagtgttaggatagctgggcccctcctgcaagagtgtgtgggggtcctcagttcttagagaattggggagagggagcctttctcaggttattttaggggtcaagtaagcaagtgaggttgaggaagtgacccatgacccagagcccggaggttagggctgacccggccagttggggtttcctgtgtgatgttttatgggatcctctttgcagccccagggatagggtcagaggcccctgggtgtaactggcaggagtggacaacttggggctggcttagtagttcccagccacacccagactgaagggacactcaccgggggtggaggctgggggctgctgctccctgaagtcactctgatcgctggccctaggaaaggtcagggttatttgtgaaggtgcaaggttaaaagtcacaaattggagttaaaataggggaccaggaaaggagcctatttccaagaggggtatggagacctcctttctttatggagttctgtggtaggaggggcccaggtgaggggagttgaggaaaggccttacaaagccacatctgtcctggccagaggggaaggactctcaggcagatgctgggccaggagaacattgatccagtgacacaggaaagggactgaggacccagggaaggaatcagaccaccaggggttgcctgagaggaagggtcaaggcaccagggggaaagcagggccaggcacatgtgcaggacactgaggggactgcatgcatcttggattctcctggaactcagtgtccctgctgtgaccagacactccactcagggctggagatgctgaaatgggacaatgatcttgtcttctgtctctgccctttggcaagagacataaacgacattccaggatatgccatattggggccccggttctcccttctcacagctcagtgtctgcagttaccatgtcagtcaaaggggtgctgaccccacccagcccgtccaggctgttccagtctccactatgtgataatgcccaggatcccccctcagatgccctctcactgggtggatggattcagtgaacagggggaggtaccaggtattgagcaccgctcccccctgctccaggcagctgtggctttgctgtgctaggaaactaggaccatgctcaggggcatggccttaattggactgaattcactgaggacaaagctgttgaggaagcagcccagggtcagcagctggtgaggaaggtgccatggaatgagagggaaggatccctggggagtcgggaggctggggagagcctggcactgaatacaagacagggtctccttccttctcgcctggggtcagcgtgaaggatgggagcagaatggggaaaagctgtggtacctgccagtttttcggaggagcaggaaacacacaagtgcagccaccagaagactcccaaccaggaccccgatcaggatgcctagagtgttgtcatctgctgaaagaagaaggcaaaggggatgaggtccaaatctgttccagggggaaccatgaggggccttgcagggcaggggcatggtcagggaggaaggaaatgccatggagcctgagtgtggtctgttgtgctgtcctcatagctggctcccttgctctccgtggttgcaccattttctgtgtcttaggcttgaattactgggatgcatcaactcctacattctcccacaggaagcctgcacctcatcctgctcctgtgttttttagtccctccttcctctcacatcactcctcttccccctgtttctttttttccatcccatggcagtcgtaaagggcaggcccttgctgccaactcaatgctgatgagcagggatgatgttcattgactgttttcaggggccttccacatggaaggcacagtgggaatcaatctacctgcagcttttctcaccctcccattgccttgagggagaagggtatgtgatattgtgaaatacgtatttggtgttcatcaccattgatatggttaggctctgtatccccacccaaatctcaccttgaattgtaataatccccatgtgttatgggagggaccttgtgggaggtaattgaatcatgagggtgggttttttccatcctgttcttgtgatagtgaataagtctcaggagatcagatggtttcataaagggaagcttccctacacatgtcctcttgcctgctgccatgtaagacatgcctttcaccttccatcatgattgtgagacctctccagccatgtggaattgtgaatcaattaaacctctttcttcatacattaccaagtctcaggtatgtcttcattagcagtgtgagaatggactaatacagtaaattggtaccagctagtggagtgctgctataaagatacctgaaaatgtggaagtgactttggaactgggtaacaggcagaggttggaacagtttggagggctcagaagaagacacaggaaaaaagtttgaaacttcctagagacttgttgaatggttttgattaaaacgctgatagtgatatggacaataaagtccaagctgaggtggtctcagacagagatgaggaacttcttgggaactggaacaaaggtgactcttgttatactctagaaaagagattggtggtattttgcccctgccctagagatctgcagaactttgaacttgagggaaatgatttagggcaactggtggaaaaaaaattctaagcagcaaagtgttcaagatgtgacttgggtactgttaaaaacactcagttttatgtatttacaaaggtatggtttggaattggaacttatgtttaaaagggaagcagagcataaaagtttggaaaatttgcagcctgatgatgcaatagaaaagaaaaatccattttctgaggagaaattcaagccagctgcagaaatgtgcataaacaatgaagagcaaaatgttaatccccaagacaatggcaaaaatgtctccagggcatgtcagagaccttcctggaagccccttccatcacaggactggaggcctaggaggaaaaaatgtttcctgggccaggcccagggctcccctgctgtgtgcggcctagagacttggtgccctgcatcccagccactccagccatggctaaagagggccaaggtacagctggggccatggcttcagagggtgcaagccccaaaccttggcagcttccatgtggtgttgagcctgcaggtgcacagaagtcaaggattgaggtttgggaaccttcgcctagatttcagaggatgtatgaaaatgcttggatgtccaggtgaaagtttgctgcagaagcagagccctcatggagaacctctgctagggaagtgttgaagggaaatgtggggttggaaccccgacacagagtccctactggggcactgcctaatggagctgtgagaagaagaccacaatcctccagaccccagaatggtagatccactaacagcttgcaccatgcacctagaaaagctgcagacactcaacgccagcctatgaaagcagccaggagtggggctgtaccctgcaaagccacaggggtggagcccaaggctatgggagttcagctcttgcatcagtgtgacctggatgtgagacatggatacaaaggagatcatttcagagcattaagatttggctgccctgctggattttgggcttgcatggggcctgtagcccctttgttttggccagtttctcccatttggaatgggtgtatttacccagtgcctgtacacccattatatctaggaagtaactaagcttgcttttgattttacaggcttataggtggaagggacttgccttgtctcagatgaaactttggacttggacttttgggttaatgctggaatgagttaagactttggggaactgttggaaggcatgattagttttgaaatgtgaggacatgagatttgggaggggtcgggtggaatgacatggtttggctcttcttcacccaaatatcaccttgaattttaataatccccacgtgttgggggaaggacccagtgggaggtaactgaatcatgggggtggattcttcccatgctgttctcatgatagtgaataagtctcacaagatctgatggttttagaaaggggagttcctctacacatgccctcttgcctgccgccatgtaagacatgccttttgccttctgccatgatttcaaggcctccccagctatgtggaactgtaagtcaattaaacctcatttttaaaaaaattacccagtctcaggtatgtctttatcagcagccaagaccagctcggtcgcggagatcctaacccagcagtgctagaggaattaaagacacacatagaaatatagaggtgtgaagtgggaaatcagggttctcacaggcttcagagctgagagccccaaacagagatttacccacatatttaataacagcaaaccagtcattagcattgtttctatagatattaaattaactaaaagtatcccttatgggaaaccaagggatgggccgaattaaaggaataggttgggctagttaactgcaacaggaacacgcccttaagatgcagattgctcatgctattgtttgtggcttaagaacgcctttaagcggttttccaccctgggtgggacaggtattccttgccctcattcctgtaaacccataaccttccagcttgggcattagggccattatgaacatgttacagtgctgcagagattttgtttatgaccagttttggggccagtttatggccagattttggggggcttgctcccaacagactaatacacccattttctggtatgtgactctaaagtccttagaatcttcaaagtgatgtctttttcaagctaataattgactgatgactggcagcccctaggcaacttcagaatgaggctggtcactgacccaggtaggattagagggttgggactttcagcctcacccctaatccctggggagggacctggagtttgaattaatcaccaatgaccaatgaatcaattaatggccaatgattgaatcaattaatggccaatgattaaatcaatcatatctatgtcatgaaccccaaaaggactgggtttgaagagctgaacccatggaagtttctggagtgtggtgcatctggggagggcatggaagctccacaccccttcccacatgccatgctctgtgcatctcttcatctgcatcctttgtaaagtcctttattacaaaccggtaagcctaagtatgtgtttccctgagtcctgagagctgtttgagcaaactaatccaacccaaacagggagtcatggaaacctcaatgtgaagccagtcataagaagctctggaggcccagacttgtgactggtgggaaggtggtggcaattttgtgggactgagccctctgctgatatgtccaggtagatagtgtcaggatggaattggaggacacctagctgatgtacggtgcagaactgattggctgctgggtgtgtgggagaaacccccccgcatcacatttggtcacagaagtgtgtctgtgttgatgattgttattgtggagtgagagcagaggaaaaacacagtttgagtttttccaaacagggtggaatcccatctgccaatttagaatctgaaacttatagtttcagtacttcaattaagattgaagtacttcaattcagtacttcaattaagattcagtacttcaattaagattcagtacttcaattaagattacagaactggtaagtgaaagtgatacaacaaaaatgtaaccaaagtctgctcaacttaacagctaataacaacaaagttcataaaaataataccagtcgatattgatagcactgattgagccctggctctgtgcatgaccttgttaagggctttaatcgcattaatctctgaataaatatcctcacaaccaccctgagatccaggtgtttgtaacaattctacagatgaggaaactgaggcccaggaggttgagtgtcttgcccaaggtcaaatacctggtacctattgtaaccaggatgataactggatgagtctaatccctgagttcttacccacattgctccccaggctctgaaggaatctcatccttctcattccgtgtatcattttacaccccccctccctcctaggaaaatatacaaggaaaggagtgagaggggccgagggtcactcacattttacagtcagcttgagggggtcgctcctgttggagctgactgggttggagacctcacactgatactccccagcgtcctcctgcctgatggggtctatggtgagcatatggttaaaccaggacagcttcatcctcttcgtgacctgcagacgctggttgttgaaaatccactggaaagaggttccagtgttatttgtgtggcaggtcaggaccacggagcccttctctgtgactgtggtgctgctggcttggatggagggctgagccactgactctgtggatagagtgaccaacagaaagtgtcttggggccatgctgcatcctcagagatctcagagtcaaatttagaacattctcctgtgaataaaggagaaagatgaaggacagggaggagcagagagaaccagagacacccatagcagcgagcagtagggactacagtgacctcagagaccccagggaccaggaggacccagctgcctcagaccaggaccagggagccctgaaaaccctcccacagatgagcggccccagagtcacatgagatgcaatacctggggtggctttaggagcaggcagtcagagaaatggaacatgggtctcagcccctaagggacaaggaagaggtgtggccagctcctcctaggatcctacatccaggacccagtctgtaaagaggttatgattattcctttcttttttcattaattccctccctccttcatcagagaactactgagtgtgtgtctcagttgggccttgtgcaggtacagggtgtagtgggaagagaaagctgagtcctttccttcatcctcccatgggagtgacatcaacaaatcaagaaattcatgatttcacgtccagtgagggaagaaatgtggatctgatgggagaggcttggacaatcctggcattgagtctgatagttgagacaggtgatttcgttctaagtaaaaactgactaattctccatttgcccgtcattcctcagaccagaatctccctctctgagctgaggatgcccaagaagaaaggagctgaaccaacatctggtcctggggtccacagatgccccacggtggtggccacgaccagattctgggctgcagacacacggtggtgtgacgttgagcactgacagcctgtgtgatgctgatgcaatttctctttaataaaatggggtaaatgtcaatggtccctggcttgccatcctctctgtaaattaacattaaaatatttacaattacctgacctaaagcttggcacagaatagctccaaataaacatcatctattattattttactccaaaaaaaaaaaaaaaagagttctctgggcctgattcctggtggagaaggagcggtccagagtgtcttttctctgctttccctcctcctgaggacagtgcacttcccgggacatcttttaagtttcccatccagtttaatggcctgggaagtttgtttgtctgtcctctccactctgactctcaggtgaaagatgaggctctgcccttgcccagatggggctctgggggctgagccctgcctggtgaccagctctaggaaccacggccctgggacagctggtaaatcgttgctcacaatcagccctgcccaggaagccacaacccagccctggcacaggctccccagggtcatctggagtcaggatcttgggacaggggcctggggcaggggcttgaagggctgagcttctctcagaggatcctcaggccaggccctgactgagtcctataagatctttctcaggtcatgtctatgaggaggaggccaagcggggttggactgagactgattttcccccgctgcatctcccgcatcagactatccttcttgctgtagggaatttccacggagtccggataagggaaaggaattctgatctgttatagtttgtctcccctgggtgtgtcctgcactaaatgcccaaaccccaacatgggacgtaatgcagagggggatgcaggcacagcccaggcctgacaatcctgcgtatgtgaagcagaactgacccccaacacccagaggcacggaggaatcactcaccgtatacacggagatggtgagatgcctgttcaatctgagaatttctgtatgtgacttgtagggtgtagtatcccgtgtcctctagggtgacgttctggaaatgcagatctccactgggtgatattgtctctcgaccgctgtatgcaggccctggagtcctaacgtgagtgtctattacatatgctgcgattagctggttgggctccaccgttttccctttgtaccagccatagctgtaaagattctcgggcagataaaccacagagagatgaacattctccccttcagcaacttcaaagggcgctgatgcaataaagagccaggcagtggtgggtgcgttccagaaagttaaaagtgaggctaggaaagggagagaatatcagtcaatatttgacctatgcattggcatggaaagacggggtcctgggtgcaggtctcttcacccctcagccttagagggtgtgtgtgtgtgtgtgtgtcctactgggtcaaagtcagcagcatgaccctcattccttcagtacctctgaccttggcatttccttgtgtgaaccctctttcccaggggtctgcatggttccctccccactgccttcagttcctactcacacaagggaatccctgggagacttctttcgtgaagcctcctctagagaccctgggtcttccctttctgacctttcccagctctgttccctccagggctcttgtcagcacctgacctcacattctagatctctttgggtgtctgtcttcccccccatgagattgtgagctctgtgagggcatggacttgagtgatgttagttgcaccccagtgcctgggacaggctgcagactcctgtggatgagttcatgagcgttcccagggccttccatatcctggggtttatttgctaatgtctgaggttggcagatgaagacagagtttcatgccctggtggtgtttttatttaaattgtcactgtgatatagttttactatcattttcaaaatgtagtggccactgacaatgaacttgaaaacatggaccaactgagattgttttgccccttggcaattccagttcacttagattttttggttctccttagacgctctctcccctgagtctctaacaaaagccctctgtctcctctcagagccccatcctccccaggagaccccagccagtctctgtgctccctcctcccacccactcccagggagtcctcccctcacctgtgagcaagagcccctgccaggggatgcattctctgtggggacaagctgaggggggccccatggtctctgctgcctgctctgtcctcctctgtggagaggagcttgggctccaggaacgctctagacagggttactgtgactgttgtctctgctgtccttccttcctctatgctgagcttcctctcaggcaggagcacttcccgtttatgggcaagggcggggctctgcctacaatgtctctctgtcccctcccctctcagtcctgcctcccttgtccctcctttctccttcctttttgcctatatttggttccctaggcaaaactttgagaagcaacgctgatggggtcctcataacaggacgacccactctccccagtactgacctctgctgtgttctggccttggttctgtcacagccggtagattatttccctttgtgacacacaaaaccagctgggccctgggtctcctcatgctctccagtgctccaggaaggcagaatgatgcccagcaggaaagtgacagaggtggctctgggggctagaaaggggctcactgggtgatggctgggaaggacccacccgctatcttcagtgtcaccagcctggcctctgacccagggacagagacccaggcctggaggtctcgggaggatccccagctcctaggtgtggagggaggtgtcctgtgtgtcctgggaagagaggactttgatggaaggaggtgggaggctctgggttctgctgtccttggtgaaggtttcagggggaccctctccatgtctggggtctgtgcccccagcttaactctcattctctttgcaaatacatatattttgtggatctgcagttgcctgaactgtctcatgtccctaaatctttgtatccctttttacagaaggtcaggaagggtgtgtacatgagtatgaggactatctgatcagggcgagtgtttgtttcccaaagatctctttagatatggtataatacataagataaatgtactgaattagcaattttaagtgtagaattaaatgatactaattctattcacaatgttgtacaaccatcaccataattttttaccagaaaatcttcattataccaaatggaaacttcatacttttaatcaataactccccacttccccctgccccacccactggtagcctctgatactatcaatctctgtgaatttgcctagtttacatgtctcatataataaggaattatatacgtgtattatttttttctggattatttctcttagggtaacacttttaagattcatccacgtcgtagcatatattacagcttctttcctatttatggctgagtaatatcccaatatatgtttatacctcaattttaattcattcatctcttaatggacatgtgggtggtttccacatttttgctattgtgaaaaccgctgcaatgaacttacacttggaagtatctgtttgggtttctgtgttcatttctttgggggtacatataggagtataaatatggggtcatgtggtagttctatgtttaagtttttgagaaacagccaaactgttttccagtttgctgtgctattttatattcccatcagcaatatacgagggttccattttctctacattcttgtaaacacttactatttaatattttttaaaacttatagccattctagtaggtgtgaagtgatagctcattgcagttttgattttcatttccctggtggctgatgaagttgagcattttttcatgtatttactgacaattttaatattttttagagaactatttattcaaatcatttgctgtttaaaaaaaatgggttatctttttattattcagttgtaatagttctttatatattttagatacaagtcccttatggggtacatgatttgcaaaatttttctcatattctgtgtcttctcactttcttcatggtgttctttgaagcacaaacatttttaactttgatgaagttcacttatctatttttaattttgttacttatgctcttgatgtcatattgaagaaaccattgcccaatccaagatcattaagttttactcctatatgttcttctaatggtttgataagttttgctattccatttaggtttttgaaacattttgagttaacttttgtatgggctgtgaggtaggggtctaactacactatctcgcatgtggttatccagttgttccagcacaatatgaagaggctaccattctttccccattgaggaatcttggcacccatgtcaaaaaccaatgggctgtaatggtgagggtttatttctggactcttgattctattccattgatctctatgtgcattcttgtgccagaagcacactgttttaatgattgtagtgttttagtaagttttcaaattaggaagtgagtcctccaatttttttttccagattgttttggccattctggggtgacttttaaaaaagatgtagttcaatggttctcaaagcaggagtggttcagctctccttttttggcagtctggagacctttttaggaccttaatctaagtagataaattattcccactttcttttctgagttgctatgttacagtgtatattgacacccatgaaataattgagagaccctggaagtgcttgcctacatagtgagggacaattagttccatgatcatgggcacagaagattttgttttgggaaacaattttgttggtggagttatattcatgcttactcttttatttgtcttcatagcctgcatctccttcagacttcatatctgtttattttcttgtttgtcctctggggtttgggtgttgggtgaccagtcagctggagctggaggaggtgcttagcaaggcagtgaccctggttgggaggagcagggctcagcagggtgaaagtagctgggccttgagtcaggagtggcatctggaaggcctgactgtaagggtcagaagggccagcaggtgggtgtcctaggcacaaacggtggctgctgctgtggactggaggaaggtaagaggccccgagtattccatgttcttactggctccccaactgaggattcctctcctgggctggtgctgtcctgcagcagggaggggttagacagggacggctgcacatcaggccggagtccatgtcatcctcttaggcactgtcactacagattgaggattctgttcataagccaagcctttgcacaaggaagggacccgggctctcaaggaagagcagctcctggtcagacctccatctccttctctctcattgcctgaggcctcaagcttggtctacctggcacaggggtctggatcctcctcccagggttggggtcttactgagctgggcacctgcaggtgggagaagatctggaggggccccatctgccttcaccagattgatgttgagggtccctgagtcctgcaccactatcaggtgctgagcaacttccagtgtcagtgacaaccaccccatggtggaagcagaaccacctcgtgagaaagcacctccaagcctcagtgcttgccatgtgtgggaatttgctggtttcagttgggggcatgttggtgggtggtcatgaattcagggccggattctatgctcacagtgcacatgctggatgtggtacagaccccaggcagggctcagtggggtggttttgggtgtgcacaggtatcttttctggaggagctggtggtgatttggctcccagaagttcctgagctctgcagactcaccaagcactcaatatttgagtgaacattgggcgagagagcagaaggtaagtgtcagggcatcggggttggtgcctctgggaagaggaggaacattctgggaacaaagctctcccccggcttacagggagcttcccatcgctcctgccttgaggatcagggaaactagggcctctgctcttccaggggctgcttgcaggcagtttgctctgggagggggtgacccaggagttgcctctcattttgcatttgagatttaaaaggagaagggacagtatatcttgccaggtcacaaaaattacaggcatcatattgactgaagggcactcctgtcatcactgcaatataccagaatggtcttttaaaaaaataagtgatttaggtttaccagcaactgtaatgcttgttttattcttctagttcaccgttaatgtcacttttgtagttttagcactggcaatgttgattttatgttgactctgatgattttaagctttcatttgttcacatagagatcatcttctttctgaatattaatgcattttttctctatttctactggttattcctgtacatagagtagagaatcacttttcccaaggaggtggaaagcttctgactaccaaaaaaaaaaaaaagtgtcaaaatgctttaaagtcagtaacttaaagatcaaatccaagagtgggcaacagattctgcccagggtctgaaaggtggagaggtgactggtgaggatgtttaaaagacctctcctctctactccctaaatgggggccatccagtgttcttgaggttcagagaaggcccagggctggggcagcagggcactgtcagctcccagctcccaggggccaggagtaagaccccaacactgtccagacactgattgcattcattttgggggagagtagattcttatttaaagaataatacaaaagtctacaaatatgaacataaacagaaattcctttgctacaattttccccttaataagacattccttcctaatgacatatgtgactgcattcatggctgagatgttttctaggatggtgagagcatcagagtggactatctggtgccttggggtcatgcattttcttcttccaatgtctacaggatcccccatgtcccactttgtagtgtaactcagtgtgtgtcattctggtttttgttgtatagatccttggaaagcccatgtcattcctgctgtgaggtacaggcagccaaatggcatcatctctaaacatgccttctcctggtacatcaaattatggaataaatgaaagccattttgacagatattgaagatataagtttctactcttcccacacatgcttctcccaagtgaaggattttactggtgaattgttattagagattagtgtggatcagtgactctgccaggggaaattttgccctctaggggacatttggcaaagtctggaaacattgttggttgtcagagctgggggagggagtcctgctggcattgagtgggtggatggtgctgaacaccctgcagttcacagagccccaccagtttgaccacccaaatgtcaatgctgaggagtggagagccctgctgtgccctcccgcagcttccctgaagcttcccctcacctgctcctcccatgtctccccaccacttccccacttcacccgcctccttacacctcagtcccctccacctgaactcaccccttagtccaaggccagccctgatctccgctctcctggtctccttgctccttagcaggaggcgcccactagatggcgcccttgcccttactggagctcaccgtctccctttccaccctgagacaaatgtggctgcttttactgccacaaccccagccctccacactctagatttgctcagggagcagctcctggacagacctcagggaccccagggaggagcctcactctggagattttgatggcatggtctttgaacttcactgttacccccagtcaggatccaggatgttgggagtgcatgattctgcccggtcccacttcagcaggaccccactgctgagttgtctgtggggacccgggcctctcatctccttcttgcattgcaggagagggatcttagcactgctttcacataaagtcagataatggaggagtgcaggtgagtttgggaaggtggacatgaagagaggttgtgtccctagaggtggcagcagtgagaggatgggcaggtgggaggaacacagcccatccagggttgccagccatattaggagcgacagcctttcctctaagcctccagcctttttcctgaaacattccagaactttccacttcagcacttcccactgaggctcctcaggtctgtccctgagctcccagctgagcctacctacccatctgaaatcctgagtcctgtgtcaccctcgttccccattattctgtgcagttctgtgggacgcccagctctcctgacacccccagtcttcagaatggccatcagcgctgtcgctgtggcaccagggtgactgccgcctggaggctgagtcctggcttcctgacagctgtggggcccgctctaggctcccttgtcctgatcattcatcacctccaggatgcacagcagctgggccagggggaggagcagggacaggtgtcagccaccctgtgtgtctgcaagtcaggctgggggtgtgggaggacgccaggaatgactgaactttctgatttagagggtgagagcttgcactgatggaatttgggatttaataggaaaagcatagcgttttcctattttgtaggcagggtggctggagtttggaatcatagattcccctgggatgtcactgtggacctcagtcccacccgttaggggcacagatttcagaatccacaccctggggcaaagcaggcatgggaggctccatcagcctggccagggctctctatttgtgcagctgctgcaaggagatgtgcactctgatgggaacagtgctccctcctccttggggggcagtatctagctccctgcagcccctctccctgcaggccctgccctctctgaacctcaccttccccaacccgccccccgcaatcccatctcagctgtaatcccaacactttctcatccattatgggtggactgcttgagcccaggggttcaagactatgctggctggacaatatagcgagttgttgtctctacaaaaagacaaaaattagctgtgcatggtggcatacacctgtagtcccagtcactcaggaggctgaggtgggaggattgcttgagctggggaggctgagttggcagtgagttgagattgtgccactgtatacttcagtgtaggtaacagagcgagaccctgtctcaaaaaataaaagtaaaaaaaaaaaaagaaatatggaatacattattgttaactctaatcaaccatgctatgcaatagtccaccagtaataccagtaatagccaataatgaattatctgaaaaagaatacaatttattcttagctatctactgctaaaatttttaagctatcttttatgatagctgaaacaaaagaagtaaatttaaccaaggaagtaaaagacctttataatgaaaactgtaaaacattgatgaaataaattgaaaaagacacacgcacaaatagaagatattccatgttcatgaattggaagaactgatattgctaaaatgtccttaccacccaaagtggtctacagattcaatgcaatttctgtcaaaacaccaatgatattcttcgaagaagtagaagatcctaaaattagaaaccacaaaaattcctaaaacctgcacaaaacaccctgagttgccaaagcaatcttaaacaaatagaacaaagctagtggcattacacttcctgacaatcaaagcatactgcaaagctatagtaaccaaatcagcatggtcctggcataaaaacaagcacatagatcaatgaaacagaataaaaatcccagaaataaacccatgcatctctagctaactgattttcagccaaggagccacatgcacacaatggggaaaggacagcctcttcaataagtggtgctggggaattggatattcatatgcagaagaatgaacctagaccctatccctcaccatgcacaaaaaattaactcaaaatgtattaaataaagacttaaatgtaagaactgaaactatgaaactactagaagaaaatatagggggaaaatccatgacattggtctaggcaaagagtttttggataaaatctcaacagcataagcaacaaaaccaaatataaacaaacgggatttcatcaaactaaaaagcttttatacagcaaagaaaaaaaaggccagcagagcaaagagacaacctacaaatgggaggagaatatatttgtaaatatatacatatatatttgtaaatatatacatctgataagaagataatatccaaaatatataagaaaattatgtttctgtatagttttatctgactgggatacagaggccacatccacagtcccatcctcaaaggccacttgttcccaaaatgtcaagcacatccctcaatgatccatcatcaacacctatgtctgtaggatgaagggtgaatcatgaagcactaaaaaggaagaaggaagccaatcccaaaacaaaatgatgcagggtctggaaagtccaaagcattttttttttttttttactgcatcttcctcctttcttctccacattcccaatcctcactattgattaacaaaacaaaaaaaactgggacccaccatcttccctactgtcaggagatctagcgagattgtttgagtcttagaccaaactttgccataagccaaatttctggctgactttacaatgatatgagctagcacagtctctttttctgccagtcaacttgtgctcggttttatttgcaaccaaatagaggtggtaaccaaatataggtgaccctaaaattagtcatcaggatgaaatcctaaaatgtgcaacaaactgggttgaattcaggattagtagcaacatctctgttgtgggcttgaaaagggggcacccttttatgcagtagcaaaattgctaaattgttgtttgctgagtctttggactctcatcccggattttctatgaccattcaaacagggctgcaatgaacatctatggttgtttagcttggcacacttctacatttctatatagtaatatctagaagtgcatttgctcaatcacaagatatgcacattttataattgactgctatcgaactaccttaaatagccttaatttgttctcaacattgtttaacagggtctgtttaatgtcctacgtccagcaaggacagtatcacttttcttaatatttttcaaattattggaccttaacaaatacttaatgtgcaattaattgattcctttgtattcccatgccttcttttatatgtttccttatagtacacaaaaccacattattgtttctttacttgtgtcattccaccctggaccattcctatctaaactataacattatgagagagagagagagagaaaacaatatgaaaatataaattgattaatcaaaaaaatttaaataggacaaatcaggaagacacaagagagattttaaaattattcagagaataccacaatagctgtaccaatatattttaaaacttagatgaaacggacaactatctcgataaatgtaaattaccaaaactgactcatgaaaaaatggatattatgaatagagcaataatcagtaaagcaattaaaaagacagttgataatttttatttactgacaacaataacaaaatttcaggtcctgatatttttatggtgaattttaacaaattttcaagctcctcctcaaccaattctcagaaggtttaaaactttaacaagaaaacactttctaacacattttcagaagctgttatagcatgataccaaaaccacacaagaaaattatagaccaatctcacttacaaatatacatgcaaaatcaaacaaaatcttagtgaaccaaattcagaattaataatagcaaacaagcaaaatatgttatcatacgtatggcttatatcaggaatgcaagtatgtttcaacatcagaaaatacttctccacattaacagactaaaggagaaaaacgcttgtttaattatctcaataggtttttagagaattttgaaaattttataaagttatgcgtattctgtaaaattgatgaaatccaaccttgatttatttttaaaaattgcctttcctatagaattataggtaaaggaaacacatgcatcctcacagagctacttcaaggctaagttacttcccataagtaacgtatcctgtaatgtgtgcttggcacatattcaatactaaacaaatatttgcaaatcctcaaaccacttctcgctcaaataacccacctttgtcttttgcctttatgttagggttgattttctcaattgtatcttggagatcctttggtgggtctttcagcaattaccctgaatttgcttttctgtttacaattttaattcctgggaactctttcttgttctctgactgcacccttttcatgagagttcagccatcaatcctccagaaccccaccccccccgcccccccaaaaagcaataaagatgtctaaaagcttccttctgggctttcgaatgatgtttaccccaggcatttgttctattcgttcatcacccattttccctacaacttgcctacacttgatatcagatttttatttattagtcacctatcttcttcattggcccattttcctattttgccactggttgttctcaaatgtgttatgattcctggttgtacagtcaagtggttgataatcttggatatacgataaagatttgctctgtagctgtgtgtaagcctatataaaagcttttgtatttttcttcttaaaaaagacaaaagatggttgggaagatccctccagttcaccagttcgaggctgcagtgagctatgatagcgccgctgctctagcctgtctgtctgtgaaaaacaaggggggcggggggcgggggggaagactggagatgtaaatctcccgcagggccctacccgtatccgcaacaggtctctaacaggaacagcctcaggcctgtgttggaacaaggtaggttacagaaatctggaagccagatctgtaacttcagggtaaggactggctctcagggctgatcccccgggctgggtgtcccagaggcacccgcccccgccccttccccaaggcaggccaggacaccttcactcctctccttaggctccccacccccttctcctccccactgtgcctcctggagtagcggtggcggtgccacaggggagcggggcggggcgggctctgagggcaagggggatgggccccgccggggtcactggcggccaccctggaaactcgacgcaggccggcccttctagtgaatcgtcccagccacagctggcctcccagccgcgcttggggcgcctcggggcgcgaatggtgcaggttggggagactcaccacgcaccgtcgggggtcggtccggttattcctcaccgctcggctccagtgggcgcgcgggcctctcctcctcagttcctgcgctgcagtccctccctcacccttcgcagcttgggaatccaactgtgtcattccgacggagcgccgtgaggacctccgagggtgttagcgccaagtgatctctgtccagcgctctgaatatccaagtaaaggagttcaatgaagggcgggtcaacggaggagaaaccgtgactctctcaagggagcccaaggcctccttgtctaattagtgacgcgccaatggatggaggctcttcccaccatctcttcccagcatccagtgacaccaccgccaagggacgggctcggcggaacctgcaggaaagaagcatcggctgagcctgactgcagcgctgtgaagagacaggggaggggatcagtagttggtcccgcgcccaccccctgtttccgcgaggggcggagttgactggccatgcaggcagagggcgaaatgtgaaattccactactcctaccgtttttccctgacccgatggggcggagtgtcgtcaggctaagttccctggcggtaaggtggggagattgaggcgcacacctgccgaacggtaacgcaggattagctaaggcgagctcaggacagaagcctcccgaggagcaggagggcaaaataataaataaataaataaataataaataactcactccttggtctttatttgcggcaggaattcagaaggtgaaagcggggccttaggatctttctgaccttttgggttttaagcaggaggtgtcagaaatgttaccacagggctagctggcttgtggccagcaagcgttcacaatgccctcgatttttcatccctctctgtgggttctttttttcattgtaaggcagaatttctacgattgctcacccactcagagaacctgagctggtttagaccaggtgagacaggctaggtttaccctggtgatgatgtgttgttgccatggcgatcctgcccagtaccagaggccctgcagattcagatgcttggtgcctgtgcttggctgaggggccaatgggtgaagctgccatctgcgggatgatgactgaagcctctaagtcagaatccgcccaggctgagccttagggcagctccatggagcctcggctggcctgggatagagagtccaccactgtgccagcccccagccactgcctaggtcctgtgctgagagccccttgtccagggaaatggcgtccagtggaaaagggaccacccccttgcccttcactcaaggcaggttggtgacaaccctgaagctaatccgttcctagaggagctgcttctgggtccgagttttctctgcagcagagcagctccctggatgggatctgttcaaagtccgcctttcacgcggaattttccgtccttgcaattttccacctccaccactaggggatcctctctgaccgcctcatgccggctctggcctctgagcaggggtttctcttctgcatgtgcgaccttgcgcatgcctagtggccttttgggacctagagctgctccacaccccgatggggttacagagtgcctcgcctccactccaccccaccagggttccttccctggctgggatgggatttcagaagcgccgaggaacagcccagacaggtgtgggagagtagccaaggcccctgtcccggggtggccaggacagcggtggcctcgcataggacctggctgggctgctgcaatcagtgtcctgccccttggagagcaacagtgaaaacaacaagactatcttcacccaccttaagaaagaacagaaccagtatccccaactctgctgtgtatcccaacccaattccattccccaccccactctcagtagccaatatgcaaaatattagaatactcttactgttattattttcaaccacactctgcatcctgaaaaaccatatatttcgttatgtgcttttaaacttcttgaaaatgaaatactgaggctgggcgcagtggctgacacctgtaatcccagcacttcgggaggcggaggcaggcggatcacgaggtcaggagatcgagaccatcctggctaacacagtgaaaccccatctctactaaaaatacaaaaaattagccgggcgtggtggcgggcgcctgtagtcccagctacttgggaggctgaggcaggagaacggcgtgaacccgggaggtggagcttgcactgagccgagatcgcgccactgcactccagcctgggcgacagcgccagactctgtctccaaaaaaaaaaagaaaaaagaaatactgaattttcaaatacttgctttttttttcggtcaaaattatgttctcaaatttcactcctgtagatgtgcgtggctggctgtagtttttgcatttttattattaggtattctcctgttgcattaatatgccacattttatttctctcatgtttttggtgaccacttggggtgttttttggttttgtatttttgctgtatacatgctgccatggtggacatacctctttatacatatttcctgttgtatgcagacacaattttaggatgtgacatcttcagcttttctattgtgtcgtgtgtcttttccttcgtgctttgtgttatttacatattctggacacagattctttgtcaactgtatgtgctgcacatctctttcccagtttgtgtcttcttcttcttttttttttcttaaaaaaaactttctttatagtgttttttttttctttctttctttgttttgttttgtttttttgagatggagtcttgctctgtcacctaggctgaagtgcactggccgatctcggctcactgcaacctccgtctcctgggttcaagtgattctcctgcctcagcttcccaagtagctgggattacaggtgcctgtcaccacacccagctaatttttgtatttttagtacagatggggtttcaccatgtttgtcaggctggtctcgaactcctgacctcaggtgatccaccctctttggcctcccaaagtgttgggattacaggcgtgagccacagcacctggcctgtgttctttcttaagtagatgttacttttaatataatagaatgtatcatattttgcttttatattagtactttttctatctaattcaaacacatccccaagggtctttgtgtgtagactgaccaatttctcaagaatcatgaatgaatactgcttctctttccccaatttatctgtaatgctacctttattataaagtttctatgcatgtgtagaaatagttcctgatttttcactctgtgccaccagcataccaatagcacgctgtcttaaatattaaatagcagagctttatgagacaacttgatgtgcagtaggcaattgcccccttgttactcttcttcagggttctttgttgtaccacatgaattttagaattggcttgtccagctaaaagacaactgcaaggattttatttggaagttcataattctatacataatttggggaaagtattttcataataccaagtcttcctattaatgaacacagactctctctctctctcccccacccccacctgtttagttatttatatctttatggtctgttagttattgtttattgtctttcaaccaggtttcatgtttttctacatagaggccttgcatgtgaaagtctttcttcctagcttgctattacaaattttttttaattgcactttttgggtacagtggcttgtactgtaatccccgatacctgggaggctgaggcagatggattgcttgagtccagaagttcaagaccagcctgggcaacataatgaggtccctgtctcaaaaagtttgttttaaaaattgcatttgctgttattcaacaaatgtcattgtgtctcatatatggatttttatatctgataaccttgttcaacaatcttttgattctaacaatatatcagattcttttgagttttccatatagacaataatgtcatctgtaaattataattgtttcttctttgttatttcttggaccttttattttatatttttgtcttgctgcaaggcaatatccctctatatattgtggggtcttttttctcataaagtggggatggtgaacacccttgtcttgctctctgattgtataaagcatgctttctgtagcattttgtagacgctcttttttagattgaggtaattcacttttatttctggtttactgagtttttagcataaattcaggctgaatttgagctaaagctttttctggagacatcatttgaaaaattcatatgatttactttctttaagtcaccaaagttatgatttacattgaactgagtttctactgtttaactgtattcttgggagaaaacccacttgtcactgaacaatatctgttttatttactgctgtcttgtgtctaaattttcttttaggattttttgtatatgctcagattagcctgttattctcctttctgtatttttttctggtttgggggtcaaagttataatagcctcacaataagagctaagaaaccagccctaatggaggccggggcaggaggtttggagttcaagaccagtctgggcaaaatagtgagacccccatctctatgaaaaatagaaattagccaggcatggcagtgagtacctgtagtcctaggtacttgggagggtgaggcaggaggattgcttgagcctaggaatttgaggctgcagcgaactatgattgtgccactgtactccagcctggatgacagagcgagaccctgtctcaaaagaaaaaaaaagaagaaataaaaaggaaaagataaaagagctaagcatctgtttccttttttccattttctgggagagtatgtgtaagactgtaattaactgtttcttgaataatgggagaactctgtaaaataatctggctttggtgttacctgtattggaaggatgaaaaataccaattcagtttcattattggttgatagggctactcatgctttttgttttgttttgttttgttttgtttttgagaggaagtctctctgtattgccctgttgtccaggctgagatgcaacgttgttcacaggcctgatcctggctcactacagcttctaacttccgatctcaatagatcctcccgcctcagccttcccagtagctaggactacaagcatgcagcatcacatccagcctcttttcctgcctgacccagttctggtttcctttagttttctaggtgttcatccattttatctaatgtttaatgcatttggcataagggtgctcagtgtcctttcattgtctgttgtctgtaactgttgccattttcattcctatttatgagtactggcgtcttctctcactttttcttaataatcctgctggaactttgctttttaaagaacatcttttgacttgttgattcttttttcatacatattaactattttcttattttttgcctttatatttatttcttttcctgtttgaaacattgctcttttcttactataaaaatgggtaagtagctcatgaattaccacctcttttaaaaatcttttctactgtaagcattttagcagtttacatttgcccacaagtaccacttcagctacaccctatgtgcttttacataaagtcttcatttttggtaagacatattctcaaattttaattatcacttgtttttaaatccatgatgttttatttgaaatgttgtttctaaagatacattttctggttatacttttattcttctaatttagcacagtggccacaaaacatggtctgtgcagtgcatacaatcgatgagtaatttctgagctgtagtatttggcataatatatggcaaaatttcctaagttttccatgtgtgctttaaaaaacttccagtaaaatacataaatctgttagatcaagcttctcacattgttcaaatagtctatatgtttactgattcatttgactgcttgatttatcaattacaggtaggaatgtattcaaatctcctattaaagtgtgacactcaagtggctttttaaagacagagatgccaaaccaatgaatacatgattttccccaaagcctgcacaaattctctaatgaaattttaccatgaaagtttgtttaattaaggcttactaaagcagtatgttgtcttttactttttaaacagagaatatatattttaatacatcgtttaagtttatgattaattatctattactgaggataagaatctttgcctgtgctcattcagcatttgcacttcatttatgatctgccttctcatagcttctgttaatttttatactagagacatttatttgtttgtataaatgttgaaggtttttttttgttgttgttgtttttgagtcagagcctcgctctgtcacccaggctggagtgcagtggcatgatctcggctcactgcagcctccatctcctgggttaaagtgattctcctgcctcagcctccagagtagctgggactacaggcatgtgccaccaagcaaggctaatattttgtatttttagtagagatggggtttcgtcctgttagccagggtggtctcgatctcctgacctcatgatctacctgcctcggcctcccaaagtgctaggattacaggtgtgagccaccgtgcccagctgggttttttatattataaggagatgtaatagatagatagatgtttcaaagatagtcaaatgtttttaaaatttaaaacacttttttacaggttgactttcaccatttaatttcatctatgtgttttgccttagagaaattttaaatgctatgtagatctcatgacttataattatgaagcattttgttttctgttttccacgaaacttagcttaactttgagcatataatagttgtaaaggtaggagagtaacactgaaaaaaggaattgcataaaaatggcacattttctgtagagttgtttatcgcctgaaaataggccccatttcatggaagtaagatgatcaggctcaggtccccagacgaaactcttggcatggtttttggagatagtccagggctcagtactggctctatcatttgctacttctcccaaagtaaccaatatctcatccaccctgagcccatttccatatctctaacatgaggataatagcatctaccttacacaccaagtagagggatcaaatgtaggaactaaatcaaagtaccagcactgaataacctacatcctcccacttcccaaaaggaagagagatgtatcccctgttgacaaacgagaccattttgcaggagagaaaggaaatgccagttcacttgcaatgtaaacatgctctctctttttagggatgtccagggacctgagagagaacccatgcttaccaaagagtttctagttccagacacacaggactcgaagggtgacaagtatggttttcagggtccctgaatccacccagtcctcacagaaactcctaaaagctgtcgattgacagcgttgagttcacagctctggtcctcacatgctgatactgcttgtgatatcgaacccgacaggaccccacatcacaattgatttaccaactacaatataatacctcctgaatctccaaattggctcacccaggaacaaaggcttggggtaaaactggattaggagatataagctctgaattttctgagggtgagacacacaaggattctaagtgacacgccacagagtaacgggtctgtgactggaggacccacagatttgtcttactggagacaccacatgcacacaaactccatccttagctgtggaaacaagggtcttttgctatcttagccgaattctgggagtaatttttggaggggaggagatctttgggattgcctctttcaggccctttacaaaaatacctacttcttaaatggtaaagcttacactaaactgaaaaaattacatccttggctttttatgaagtaggtgttggattgaatcactactggaagaagtatggcatcgcaaattctaagcagtggtcaaaggatggatctgttaaattagaaaaatctctaaatttataaaaagattttagattcctttattctaaacaattgacctatttgtactcatgggacaatcaaatttcaaaggagatatgtaacgatttcatggcttgcattaaaaatccttctgataaaattaaagataaaaaatctgaccccctgccaaaaaaatcttttgaagttcatactgcctgctttcaatattctgtgggattcacaatgaaaggtgccttatattgtggcctagcttcaagtttatgccttcgccaccatggcctgggttcaattcccagtcagggccccagcgcctttggtttaatgtttgcgtggcatttgacttttttacctatttagtattggtgagattacctttggtaaaaaaaagtttaaagagtggaaatcgcaattctttgtgttggctaaaatctgattataagagatctggaaggttttatttttctttttcaaagagctctatggtcagaagtcggcttcatgaaaagctaatatttaattatatgtacatacagtctttctggattttctcttttgcctcctgttttgaaaaatatttggatttgagtgaaactccgttttagaaattaattgcttggtacaatatacccatgtaactaccctgcacatgtaccccctgaatctataataagagttgaaattttgacaaaataaaattagattttgaattaaaacaaataggtgcttggttcctctgctcacttctttttaaaaggaattcctctcccatgtacttcttcttttcccttctttaccttccttttggcatctttggtatcacatgaagggatctagagggaattttaagtgactctgaaattccttgagaaatacacaaaaagatcccactcaccccttttgggggtctcctgttctccttgtggagtccagagtcagggacaggctcctccaggtctgcagctctgctctcttttatttcatcttggctgattgctttggttttgtgagtaccaggcattactttgtactgtgagagacacgtcctttgtgagtgcaacggctgctgggtcactggtgagggctgcagtttggagatggctgagagccgttgcaataaatggttgtgattgcagggggctccttgtttctttgcaagtttagatgagaaaggtgcagtttggacacagtttaaaggctgtgaaaacaccaccaatgaatatgatttcctttggggatggtctgattaaaagtgggctgattgttgctgtgctactagccttgaagacatgtttctacagcattgtgcagtgtggaaaaattgtgtggcttggtcttgtggcatgtcccttcttttagagacctcagattcaatgtgaaattcgggatttttgattttcaaagatctagatgccctgccttccagatgtgcctactcttcacatattttaaaattagatcctataaactgcaaatactttgttggcttctgtgagatcagaggtccagttagaaaaggaagacagtttgttaaaattaaaaactatttatctaatctaactagattggcctccaaatatgactttctgacattcagctggttactctgaaaagatttctaaatctcttgaggctcatctatatgtttccttgcaaagaaaaaaaaaaaaaaaaaaaagcaagcccaagcactagtaagaaaaagatttgcaatgtttcatgaaaggagtagatgagtgaagcatttatttgtagatactgggttggatacctgtgcaaagaagaagaggtcaataataaaaattgccaggggatttcttggaacttaacaagctgaattaaatatagaaatgtcaggaaatcaaggcaggaaatactcacttgtggttaggcagacagggcagggttctgagcttgagatggagcaaacagttgtggtgggtgaagttcacatgctttagagctcagctgtcctagtaaagaagcctaagagtctctaaagctcttatgagaagatggattttttttgcctagattaaaaggttaaagaattgctttaagttggataaaataaagctaaatgtttaagcaagttgtgaaaggtttatgaaaaaattaattaaaatatttttgtgtgtaaacatattgactaaagttgaaggggtataattcagcatttctgtaaattgagcattgaaataaaaacacaatgggtttctcttagagcactaacctgctctttaacaaaaattgtaaagggttatagaaagtctataaaaatgttaccttatggtcaaacattaaaattgggtaaatatgtctatcaggttttattaagaattaggtttaacattaatagtacactaatgtaaaggtgaaatttggcttatttggtacaaaaatcatacaggaagcattgtgaaatataaaatgatttttagctttctttgggctatatttctataaatatgttattgatgagggttccaaagttatgggagactcctataattctgctatatctcagtgtacattatcagtcataattataattgtcatgttaaattattgtgggccacagaggtaacagatttccttgtcaattgtgtctttgactatgactaccctaaaacgttcagtcacccatatacacatgttaccttgttttggccctctttagaaggtaattttataatcagctataaagccctaacaggtgctcttaaatgcaaattttgataactttggagattgtgacatcagaagagaggaaaaatgttcgggacacttggagagctaaaatgttcattgatatcaagcaggacaggaattaactgcatgaagtgaactaataggaggctgaagtgatctttttgactttttgcttaaaacgttgctgatcctttgttttgcttttcagagtcaaggcaaattttcttttgagctattgacagcttttaacgattaatcaaaatatactcctatgaacaccatttggagcattatttgtttctctctacccgatttccccagaatttggaaactatttgtgggtattcttaatttatggcaatatagttatttgcataagtgcaataagaatgtgttttctttggtaacaggacacaatttgaaaaactggttattttaccaaggttttgaccagaatgctgtgctttcctttaaggaatcaaacttgacttgtggagctaataaagcctttggaaaactgaccttatatcctgtgaacacagtccctgtacagggttactgatctgtgggaagaaaagaatgtcacattctgacaggtcaggaatcccaagttatcttgaaacttcaagaggacaggaattcacccaaccatatgtatttgatggtagaaatccatggcaggggctcagctttaaaaagtcttatctcagattccttctataaaacaaagtcccattaaaaccaattttaaaagcctatgtgaaaaataattattcttgctgcacctcgtacaaataaagtggcaaagcataataaagcaaattggtcctgtcgtaatttgtctttagtaaaaacgggaaactggggtcgggtgcagtggctcactcctgtaatcccagcactttgggaggctgaggtgggcagatcatctgaggtcaggagttcaagaccagcctggccaacatggtgaaaccccatctctacaaaaatacaaaaatgagccgggcatgatggcgggtgcctgtaatcccagctactcaaggggctgaggcagggaagcggaggttacagtgagtcaagatcgtgccacttcacgacagcctgggtgacagagcaagactccatctcaacaacaacaacaaaaaagggtaactggagagagggaagttatgtttcaaaaacttttggaaactatagtacacctgtttttaaattctagtctggcattcagtttttattattttctacagtttgggttaaattcgtatttctctggctacaagtctcctaaataatcttttcatttgtttcctttttctttccctttttccccatttttcttaattggaaatcactgaaacctaagctgtgctttcttaaagccctgtgaactgaagactagacaaccgaaacttctgaaggaagtagcagcaacctatttatatgtgttgctgttgcctactattatgttttagcaggtgctgcctctacacccccgaaacagagagtgctactgggaacaaatcgactttttccactccagtgctgcattcggtgccccataacgatgaccccctctcagcaggaagtagccagaaagattacaatgctccatctccctatgattcttgtgataaataaatatacaagcatgatagaaatcatgcgcaaattgacagtggggattgtggcaggccagatttcactaatggaggtccccatcacaactacttcagtactgactgagtggttaagttcagtatcaaaagctgaaagtgccagcgcctttctacaaaggctagaatgtaacaaaagcccaccaagggttttacctaggcctttcctgggccttacagcatgacaaaacaaagaaggaattcttaaccagacctgtttaggattaaacaaatttaattgggggtctgaagaaactcgccaggcctccacaaacaagttcattgggggtctaaaggaaccccccccaaacctctgtgattgagcaggagacaaggtcagggtaattgccccagcacctggactcatttagatttaagtaaatgtactgaggctccagagaaaggtctccaagacttagactagagttacagattaaaagaagttaatcacttatatctttagataaatgcacactgacacgtagacatacatcttagaaaatatataagctctggaaaaccttgtaatttacagttggtctggagatattttctgggccttctctctgtaaccggttccagaaataaaaaactctcttcctccccagtttatctgcatctcgttattgggccgtgagaaatagcagccagaccctgagtttggtctgggaacacactggctgggcttcctgcctggcggtagagcttcactgtcctccttcccagccaaaatgtggcccttgaaggcttcctccccaactgaccggttttgggttctaggtactcagggaacaccgtcttcaaggaggccattttcatactgttcctggtttgatttttctgaaattaggaaatgccccttgaggcatccaggattgtctttatttcccctgaagcttcccctcctgaagaaaaaagttctcaaacaccctcaggactcaaaccccaagttcaccctgtgaaacattcccatttcctaaacccaggcaggctcatggccctcagcctctcagaccccatggaaacctcctcccccacttcacgggttctctccatattgagagcctcccctcctcggcacacaacccagagactcaccccaacatgtgtagcaaatcaccctggaaacaatcatggctgaacgtggtagcccatgcctgtaatcccagcactttgggaggcccaggaggtggatcacctgaggtcgggagttcgagaccagcgaggccaacatggtgaaacctcgactctactaaaaatacaaagttcactgggcattgtggtgtgtacctgtaatctcaactactcaggaggctgaggcaggagaatcacttaaacctgggagacagagattgcagagagccaagatcgcaccattacactccagcctgggcaagaagagtgaaactacatctaaaaaaaaaaaaaaaaaaaggaaaaggaaaagaaaaaaaaaatcatgaggcaacattgcatttaacaatattttatttatcaaaagacacttgtctttctcaggtaagtgaaggtctagagatgaaacgagtcccgatgtaaattgccccatgggcattgctgagatcacaagatcatcactgcagcatgcagcacaatagtaaatttctcaggatggaagttcaacaatccaaaaggtagtattttttttcatgatgctcagtccatcatacgaaataaaaataaattccttttcatgatcatccattcagtagaaaaaatgatagtaaatttgttctcatgaagatttttaccgtaacatataggatttatcgttattattattattctttgttttttgtttttttgaagcggagtctcactctgttacccagtctggagtgcagtcgtgcgatctgggcacactattaacctccacctccagggttcaagcatttctcctgcctcagcttcccgagtagctgggattacaggcatgcgccaccacacccggctaattttcgtatttttactagagatggggtttcaccgcattggtcgagctggatttgagctccggacctcgggtcatccgcccatctcagcctcccaaagtgctgggattacaggcgtgagccaccgcgcccggcctcaatttatcattattcacgcatccacaaactgggttcttatattttgtacgtgattttttccattgaggagagatatctgtgcatattcatgctgctcatatttcatccacaaactcggttcatatttcatccacaaacataattttttccgttgagaagagatacttgtacatatttatgctgttcaaattcacatttcatcattcttttacaagaaatagataatgtattttaaggttttccagtggtattacagatattttactgggtgtatagatagaaattaaaccaaacttctttgttctggccgccagtcatgcatcctgttttcaacatagttcacatacaactggttgtgtaaaaatgaaattattttgtttagtacaatcatcaacagttggttgattagatttttaattatcaagttaatcattgtcattatgcttctcatcgcactcgtcattaattgctgtgggaggaaatttgttatgttccctatgagagggtgtatcacaaattcaaataagaattcaacgacaatggactgtataaaggaaataagcaagtccatggaaaacatatttttttccggaaaggattaaaatatttttaaaaaggaattaaaaaaaaattgggcacggtggcaaatgcctagagtcccagctgctcaggagatggagacagaaggattgcttgagcccaggaataagttggaggctgtagtgaacagtgattccaccactgtactccagccagggcaatagagggaaaccctctttctaaaaagacaaaaagaaacaaaacaaaacaaaaaaacaccacatcaaaaaacccaacaacaaaatgaaaaaccaaataacagcaatacaattggagctattcgatccaaagaagtaaatgaaacataaagcaaataaaagagaaaagctaatacctgtgtcctgcaggactcagtccaagttctgctctgactccctcctggtgagccaccccttaaaaagtcacttggggcggggttactttgacagacagtcttctgtcaaagagggaggcggtaaatagcacttttttttttttaatttaacgcctttccaacaaattagcggctatgttgtctaagagtgcaaatgtcagaggtgggtacaggcagcaagaccctccccacaggggcagcagaaggaggaatgactaagggaacaagactttagtgtgctcaactacacaggacaggaaacagatgctttttacaaaagctggtggacttgaaggcagaatattttcaagttcctgtaactgcgaactatgacctgtagcctgtgagagtgactttctgtggcaaaggagcttttgtgaatgtgaggaagttaattatcttaacagtgggaggttctcccggcttatctagctagaccctcgtgaaatcccaagtgtccttaggaaggggaagcagagagagatttgagtccagaagaggaagaaggtgatgtgaggcccagtaggggaacaaagggcgatggcatgtaaacacttagcccccagaagtgggagagggctggggttcatcacaccagaatccctaacaatcagccttattttaattacccttgaaatggaaggaggccttagagagccagaggcttggaggggcaccctctgctgcatacacagatcccaactgctgtgggctccaaataattgcaccagggaaatcacaaattatcaaaaataaaggatgtaaagcttttaaaaaatattaaaagcccaacaaataaaaaaagttctaaatctataaaattgacctcagtctgtatatttagatgagtcatgtgtatatagcgtttcacttcaaaatatatgataaatctctcattcattggcttaaaaataaacacttcaatcaagtctttatcagaaaaattgaaacgttaactcaattgccttttagttcatgtgactttacaaaacttaaaacaataaagtcagttttaaaaattattagtaaagtaaaagaaaaatatcttcacaatgtagacattttgtccacatgagacatgtgaaatattgccattactaaatatttgcaggtcaaaaactgtttccaaaacattttaaataatcatctggcctgtctgttttagagcattcaattctagctgaggtctggggacatgtgaaaggagccacggcccgactccgtgctgggaagagtcagacattttccacagctctgtcctttgctgtgggctctgcaactcctaccaattaaaattgcttacgtttttgttttatttttactaaagaggggttcctaaaagctaacattatactgagtatatgtaactaaaactactaagaaaacaatttcacaattatacaaatgtgccaagtaaatgaaaaaataaactgtattttaataaaggttataaaaagaaaaacatatagtggtgtgaggactgtctcaggtcttcactgagcaagggatcatgacattctatggcggacagctgaccttggctttctgctcctcttgattatgtctactaagtgacatacttactctttttccacctgtcttgcctctaagggtaacaggttttatgagatccctcctagtgctttgcaggtcagcctccctttgctgcattccaattttactgcctataccctccagctggcttttgatgacaaaagtcctggtcccagccattctcagattctgtcatccccgtgggcactatggagctcagcactatgggaggttccccaaaaatctcgttttctatgaggaatggccaccacctgcatctcagtgatgctagtgacccctttcctactcctgtgctcactggtcctcatgaagatcctggttggtctgtagccccctatttttcctattaaagagaaattacagtaagacccatttgtgtgcaaaatcaattttaggcttattacacttggcctgataatttgcataaaatgcagcaagaattcatcggccatataggctacttttgagttaattttcctgggtttttacctaaaaatatactattttggttagagtcttgtgaaaataaccaatgtgttcaattgttttattttaaaaggctcttactgaacactataaatatgtataagttgaatatacaaactatattgtcataaaatcacaacccaaaatgtggagaacgcagagggaaaggtaaatttgctcgcaaaaacatacttcacccaaataactggaaaaaaaaaaagactttcatgacccttctttaaccagagcagcagctttcaaacaaggtgtttgccttggaaatgccattcacaagccaaacggcccttgagagctgtctgtcaggcactgtagaatctagcagctcctcacagagttagaaatagtttcaggaaagagattccctgcttttagtaactgcactttatattcccagatagcgagattgtatgtaaaccatttttatcttattctggaactcttttgggtactttttttttttttttttaaatgatggagtctggctctgttgctcaggctggggtgtagtggtgcgatttcagggtatgagaaaatgcagctggacctggctctttccaggaagaccctcacagccaaggagtccaaagcctggggttttcatctaattccagtgtgactggggtaggagcagctttggtgctgggtgtgtgtgtgtgtgtgtgtgtgtgtgtgtgtgtctatgcctgtgtctgtttagggtgttaggctcgtggttgtctagatacaaatgtcccagggctcaggagccccagggttatgtcaggggcaccagatgaaggtgtcaacagaagttagggcacaagggacaaaggtgagagcaaggttagattcatttaggtgcaagaaatcatagagggaggagggagaggaagccctcctgctaccaccgaggaagaagcgcagcttaaggcagaaagcctgtccggagaggaagtgagtttgagggcagggctctctgggtaaagtacggtctgggacaccagcctgggggaagggtacagaatgcagagtggcctggcgtggggactaagaacagaggagagcagctttcactgggagggtcagtgttttcagtgtccagcactgagcaaggtgagatttgggcagcttgctgtgaaataaggtcaggctctggcattgtccccattgcgtgtgtgtgtgaggggcactttgggagagtgaactctccacctccatcctctcatacgtccttcaaccgagcttgccagttaccctgattccaaggagatctatttattgttgacaatactggatcctagcagaggctgggtaggagcctgggcacaagcaagtggaggagggggcctgggcctgaaagacctgggaggtttgagagaggacacagcccacagaatggagcagatggggtagagtcggcaagcattcagggctcctagtaagttggacaatggagaccctgaaagatccagtaaaacggggagaacaaacaggtccccaactcacatccttgcagtgcctggagcttcagactccagacaggtggggaaggaaaattgagggatgtgaacatgttggagaatgtcgtgccctgaagaatgaagaaaaggggggtgaggaatgagagcaggaacggcttccagtgcctggtgcccaggagaactcagaaaatgggtgtggtggagaggaatcgaggaaccggaagtggtggaagtgtgcagggcccctccgagatcactgtgactgccaggcgtcctccctggctggagagcttcactgtcctccttcccagccaaaatgtgtcccttgaaagcttcctccccaatggactggttctgggtcctatatatttgaaggggtggcctgcctctccacacctgtgggtatttctagttgggtgggaggagagacagagaaaagaaataagacacagagacaaagtataaagaaacaacagtgggtccaggggaccagcactcagcacaccaagggcctgcaccggcaccggcctctgagtttcctcagtttttattgattattattttcattatttcagcaaaaaggaatgtagtaggagagcagggtgataataaggagaaggtcaatgaaaaacatgtgagcaaaagaatctatatcataattaagttcaagggaaagtactatgcctggacgtgcactcaggccagatttatgtttctctccacccaaacatctcagtggagtaaagaataacaaggcagtattactgcaaacatgtctcacctcccgccacagggcagcttttctcctatctcagagttgaacaaatgtacaattgggttttacaccgagacattcagttctgaggggcaagcaggagacagtggccttcctccatctcgactgcaagaggctttcctcttttactaatccacctcagcacagaccctttatgggtgttgggctgggggacagtcaggtccttctcatcccatgaggccatatttcagactatcacatggggagaaaccttggacaataccccgctttcaagggcagaggtccctgcggctttccacagtgtattgtgcccctggtttattgagactagagaatggcaatgacctttaccaagtatactgcttgtaaatattttgttaacaaggcacatcctgcacagccctaggtcccttaaaccttgatttcatacaacacatgtttttgtgagctccaagttgggtcaaagtggctgggtcaaagtggctggggcaaagctacaaattaacaacatctcagcaaagccattgttcaaagtacaggtctttttcaaaatggagtctcttatgtctttcctttctacatggacacagtgacagtctgatctctctttcctttccctacatatattcatggaccacagtcttcaaggagtccatttcctcactgtttttggtttgatttctctgaaattaggaaatgccccattgaggcacccaggattgtctttacttcccccagagcttccactcctgaggcaggagcttctcaaacaccccccaagactcaacacctaatttcaccctctgaaaccttcccatttcttaaatccaggcagggtcatggtccttagcccctcagatgctgtggagaccttctttccctttcatacattctctcaagattaaaagccacccctcctcagcacacaccccagagactcaccccaacatgcattgcaaatcaccctggaaacagtcataagaccacactcatttaataatattttatttatcaaaagacactctttctcaggtaagtgaagttctggagaggaaaagaggagtcctgatgtaaattgccctgcaggccttgctgagatcacaaggagattgttactgcagcttgtagcacaatagtaaatttcttctctggatggaagttcaacaatccagatcgtagtatattccttttcattatgctcagtccagcaaatgtgatgataacaaattccttttcatgatcatccattcagcagagaaaatgtttgtaaatgtgttttcatgaagatgtttaccataacatacaggatttaccattatcaatgcatccacaaactctgctgttgttttttatacataattttttccatcgagaagtgatagttgtacatattcatgctgttcatatttcaaccacaaactctgctggtttttttatacgtaattttttccattgagaagtgatacttgtacatatttgtgctgttcatatttcatgtttcatcatccttttacaataaataggttatattgtattttaagtttttctaactgtagtgcagaaattgtactgggtgtatacatagatatcaaaccaaatttacttgttctggctgataatgcatcatttatttcatagattatgtatttctttgacacatttcacgtacaactaattgcataaaaatgaattttcttttagtatagacatcagcatgtgcttaattcggaatttaattgttgagttaaacatcgtcattgccttttccgttgttattaattgctctggtgggaattttgttatctcatacataagacagtgtgccacaatatctcttaaaatttcaatggcaataaactttatatttaaaaacagggaatctatggaaaacacatttttttctaaaggattaaaatatttttttaaaataattttctaaaaagttaggcacggtagcaaacgtctagagtcccagctactcaggaggctgagacaggaggattgcttaagcctacgagttgggggctgcagtgaactgtgattgcaccactacattccagccagggcaatagaagttaaccctttttctaaaaaaaaaaaaaaaagaaagaaagaaagaaaaaaagcaacaacaccaaaacctcaccaacaaaatggtaaagaaaaaaaaaacagcaatacaatgtaagctatttgatccaaagaagtcaatgaaatttaaaacaaatgaaagggaaaaagtaatacttgagtcctgcaggactcagtccaagttctgctgtgcctccctcacggtgagccacccctttagaagtcacttgggtcataagttaacccgataggaagtgtcctggccaatgaactagggaggtggtaaatggcaccattttaaatttaaattcacggccttttcaacggatcagtagccatgttgggtaagagtgcaaatgtcagaggtgaaaagaggcagcaggaccctcccctagtgcttgggcaacagaaggtggaatcactaaggggacaagactttagcatgctcaagtacacaggacagaaaacatgctttttacaaaagctggtaaatatgaagagggaacattttcaagttcctgtaaccaagaactaccgcctgtaaccggtgaaagtgactttctatggcaaaagcgtttttgaaaaggtgaggaagttaaatatcttaatgttgggaggttcttctggtttatctggctagaccctaatggaatcccaagtgtccttatggagcggggagcagagagagagatttgagtccagacgaggaagaaggtgatgtgagtctgggtgcgggacagggggagaatgatgctatgtggggatctgggctggggaatgacttagctgcatgagcggagtgacttagactcctgaactagaagaaatctagggctcatcacctcagcagccctaaccatcaaccttatttttattacaggtcttccatcgacggactccctaaaaagccagcggcgtggaggggcgccctctattggacaaatagatcttgactactttcggccctcaaatagcctgactaggcaaataacaaataataataatttttttttaaatcatggaaaatattttaaaaaacaattaaaaagttataaatctataaaatctgcttctgtctgtgtgtctgtatatttagatgtctcatgtgtacataatgtttcactaccaaaatatatgatgaaaccctcattaatcggcttagaaaactaaacacctaaatattttctcagaaaatacaaaaactttaactcaaatcccttttaattcacctgactttaaaaatctttaaaaaataaagcatgctttaaaattattagtaaagtaaaattagaacatcttcagaatttagacatttggtttaaattatacaggtcaaatactgcccttagtaaatattttcaggtcataaacaactcctgtaatcttttaaataattgaattacatgtctgttttagagctttaagttctagctaaagcctggggacaaatgaagggcaccatgccccctctctgtgctggaaagagacattttctacagctctgacccttgcagtaggctttgcaactgctacctatcaaaattgcctacatcctaagtttattattaaaaggagttgcttggagttaacattataatgaatatatgtaactaaaactatttctcatacaaagtatatgaaaaagtagaatgtatttttaataaaaagttataaaaagacatgaacatgtagtttttataaaaaacagtaattttgtctagttttgcagttctaaaaagttatgttaaattcaaaaataaaaaataacaagacaagactcaaggtttaaataagttgtaaaagatttgtaaaaattagttctataaaaattttacaaaaaaaagcattggttaaaatttaaggaattattttgtttttacagaaattaaacattcattaaaaacactctgatacaaggccttaatttgggttcatgtatcagaatagcagggttttcttagaatattaatctattctttaaaagaactatgaatgttatgcaaactttataaaaatcttaccttagagtcaaactgattaaaattccatagattttacgtaaaattttattaaaaattaacttcaacaaaaataaaatttgattttctcctttaaacaaaagttttgcgtaatattaaataataaagcatttttgtttaccttttaaactataaacacacacacacatacacatacaccaacactaaagtcagctgacctcatactgtctttattggatattcttgtttaaaaaactatcttctttggaaaataaagttttttattttaaaccatattttaaattatcattttgactaaatccataacatacagtgatctgtaataattctattttataatatcaagtgttttgaagaactccaggaacagccatgagagaacactgtggtttagtaacactttatttcctcagtttgaaaatagttgtctttcttggggaggccggtttcagcagatgaaaacaagagtcatgatgaaaattacccagcagtggttagtgtgaccataggaacattgtcatcaggtcagcagaaaacatatcagcaaatttttctcatactggcagtgtgtaggggtggatgtttacagttcctgaagccccagtggtcgtgtggtcttttagttttgccatttataggcaacttgtggtaactagctcaattagacacattccttatcacaaggacagagggctttctgtatcctagggttcttgccttggcattccagaagaatcaggtcacacgtggacgtggagaatgagtgcaaggttttattgagtggaagtagctctcagcagatgggggagccagaaaggagattggtttctccctggattggggccgttcagcagccctggctctcctctgactgccccaggcaaaatccacatcgttctataagtcggtgccctgctggtgtgctggtgcctgttgtcatgttcctcttcatgtccagccgcctgtgtgttcctccgctgatgtgctcctctcgacgtcaagcctcctgtgtgtctgactgctagggtcttggggtttttataagcacaggatgggtcttagcaggccaggatgatcttgggaaagacaacattcggtcaggaaaacaaaaatgcctgttgtcatctaggtccgtggggacaagcccaggtgtggagcttttagccagggaccacagcctcctgtatccaacacttcccttcaccttttctatatcattcaaagggatcatgcccttcccatcccagcacttcactttcatgtcatttgccccctctgaagaggtacatctaactgccattagaatatggatgatgaccagtcttagctgcttcctgctgaaagggggcattgttttgggggaaaacggcagtcagattcctcccaggggtctctataataaaagatcgaggtggctactttcaggaggtcctctaatgtactatctggtcccaagtcccatttctgcaacctcctcctgatgtcaggagctgcctgagtaataattttatcctttaggattatctgtccctcgattgaattaggagatagagaggtgtgatttaccaaggcctctcttagcctctccaggaaggcagtgggattttcatcaaatccctggttaattatggacaacttagtataattgagaggcttggtcttagacctacgtaagccctctattatgcacacctgaaagtgtctcctcttccagtcttccatctcattattgggatcccatttagggtccttcactggtgctacttctcttccagttggataatattcgctcccttccctgatgctataggtgatgcaaagctcatccccaaatctctctgctgctggcagagcagcctgcttctcagtgtctatcaggttctgactcaaaagtaacataacgtctctccaggagagttcaaatgttagggtgaaattctggaaagcttctatatatctatcagggtcatctgaacacttgcccagatctcccttaatttgctttaagtcttgtagggaaaagaggacttggaccttactgggcccaaattcactgggcatctgtaggaggggcaagagtgagactgggcttgtttgggatgaagatttctaggaggggccaggtgagaggctgaagctggatacggaggttggggtggacccagaggagcagggcttgagggagctggcacgtcagctgggggtgcgtctgggactcgtgtctttaattccctgggcttgaccctggcagccttccccgagacagcaaacaggagggctggaacaatcctacatgtcagcaaaggtctggattgctttgcaaggtatagaaagcctgcacatttggggcctcagaccatgtgtcctcacatccagagaaaagttctaattgcaggatggtattgaaatgaatggtcccttcctgaagccaagccagtccttcctgtaaaccataatttggccaaacctatgtgcggagggctatgagatgcttttcctctggattctgagggtcaaaacagtcccaatggttcaggatacactcaaggggagtacaagctgggggtggtgaggagaactggctgcccattctgaaagacagggaatagaggtgttcctcatttcccttccttcttttggcaaaaagctcagggtgtgatggggagggaaagcaagcatcttcacttcactttccacctcttacccctgcgccctggcaaccttggcaggtgccggccacaggtacaaatgcggtatgtacccatgaagcagggagaacctggagattaggaattaactgccctcacctatgtttccttttctccctgctgttgaaaaactttgagttccctgggcctttttatcccatgaggcatggcctccttctgtgggatggggttcagtcagcaggaattggtcctgtccatttacattgtgcctgttgcctggctttgaattcctcagacctgctttctctttctagggcctcagcctgaagcttggaattgagtttgggactgaaaaagcatttcagaggctgtttatatccatttagtgcctcaaataagccctgctgaatttgcaattatcagccagcaggggtcactcctctgttaacttccctattagaaacagagcggtggggattctcacttagaaaagaaaaaaagagaaaaacagttaaagaggcaaaaagtggggaatgctgggggaagaaccccttgcttagtgcaagtgggcccctctaatccttataactttcccatccttcccccagttcagaccaggttgaattccttggccatggaaggaaaggttccattgatgcagtgggtgagaagcactctgtagggtcctggctaccatcggttttctcacacccccctcatcccaggcagtggagggagacacttctgcgacattgctccccctgccccttcatggctattgggtgtggcctttgcctgctgcaggcatgcctaggtgctggagctgggagggaaaagggtaaggagaggtgccctggaagccgctcatgcctggggctgtcaaggtggaggcatacatggcacctctaggaaaaattggtctgatttgcacctttggcggctgagccaaatgctcattttacttagtaacattgcctcagcctgtagcaaaactcttaacattataaaggaagagataagatccatttcaaataatgtgtgagagagaaaagagatgaaaggaaaacagagtcttttacctgcaggaaagggagagaagtggcagagttttggaagaaaggcaggcccaacagtttcccattcactcacactcaccttccgagatcccagacgagccaccagttgaaatgggaaaagtttccttgtccccctcacaggaggtggagtgggggtgtggcttgcttctttagtactccgctgctcaaacctctagggaagcatacagactggcaagttgtggggctacaaccccatggcagcatctaggggtagatgtttacagctgctgaagccccagtggacatgtggtaccatgtgctcttttagttttgccatctataggtggctttgtggtaaccagctcaattagacccattccttaacccaaagacagagggctttctgtatcccgcggttgttacctaggtgtaccagaaaaatcaaatcacacgtggtcttggagaatgagtgcaaggttttattgagtggaagtagctctcagcagatgggggagccaaaagggagaatagttttcccctgaagtcgggttattcagcggcccaggctctcctctggctgccccagccaaactctatgtcaatccattggtcggtggcctgccagagtgctggtgcctgttggtggattcctctcagcgtcgagagtttttccctctcaggaaagggagagaagtggcagccacccatgtgttcttgcactgatgtgctcctctcgacgtccaacctcctgtgtgtctgcctgctagggtcccagagtttttttaggcacaggatagggcatggtgggccagggtgatcttgggaaatgcaacatttggtcaggaaaacaaaaatgcctgtcctcatctaggtccaggggcacaagcccaggtttggagccctagccagggaccccggcctcctctacccatcactttccttcaccttttctgtatcattcaaagggaccatgcccttcccttcccagcacttctcttctgtatcaataggtgatgtttttaaaatttcccaactctagtgcaggcatggtactagacatatacatagaaataaaaccacacttattcttctggctggcaagacatagtatttttgccaaattatgtgttgttttgaagcattttatgtacccctggtcatataaaaataaagctattttgttcagtacaaacagcagcattttctggattagaaagttaatcatcttaaaagatcatcacggatttttccattgcactcatcactaattgctttggcaaaaaatttcttatctcacgcatgacaaaatcagccgcagtatctcctagtaatttaatggtgatgatctttataaaggaaataagcacatcaagggaaaacataattttttttaaaaaaagagtaataaaactttttaaaagtcttttttaaaagactgcttttctaaaatagtaaaataaaactccaccaataaaaccaccaacaaaacagaaaagaaaaaataatgatatgatcggagctatttgatgaaagatggtaaattaaatttaaaatgattagaagagaaaaagcaatacctgtctcccgtaggtctcagtccaggttctgctatgcctttctcctggtgagccacctatttaagagtcgcttaaagcatatgttaatccaacaacagcagattaaaaaccaatgcaatctgaactatttgatctaaaaacataaataaaatttaaaacaaataaaagagaaaaagcagtacctgtgtcctgtaggtctcagtccaagatctgctctgactcccttgtggtgagttagccctttagaagtcacttggggtggggcatatgttaattccactaacattggttctggccaatgagtcaggaaggtggtaaatggcaccttttcttcttgctgatttctttcagttcctttggagtctggacattagtcctttgtcagatgcctagtttgtgactactgtttcctatactgtgggttgtgtgtttaccctgctgatatttcttctgccttgcagaagattttcggtttcattaggtcctattgatcttattctatttttatatttttgcgtttgcttttggggcattagtcatgactacttggcctaagccaatgtctagaaaagctttttggatgctatcttgtagcatttttagactttcaggtcttagatggaagtttttatatgctttgttaaagatcaggtgactgaaagtaccgggctttgtttctcggttctctattctgttccattgctctatgtgcctatttttatacttcctgcaccatttattgaataaagtgtcctttccccaattagtgtttttgcatactttgttgaagattagttgtctgtaagcatttggctttatttctgggttctctattctgttccattgctctatgtgcctatttttatacttcctgcaccatttattgaataaagtatcctttccccaattaatgtttttgtgtactttgttgaagattagttgtctgtaagcatttggctttatttctgggttctctattctgttctattgctctatgtgcatattttataccagtatcatgctattttggtgattgtagccttgtagtataatttaaagcctgccttcagatttgttctttttgcaaagtattgctttggatatgcggtcacgtttttggttttgtataaattttaggattcttttttctagttctgggaaggagaatgatgatattttgatgagaattctactgctctgtagatggctttggagagtatggtcactttcacaatattgattctacctattcataagcttataatgtgttcccatttgtttgtgtcaactgtgatttctttcagcactattttgtagttttccttgtaggaaacttacattaacctacttggttaagtatatttctaagtattttacttattaaaaattctcagggaaatgcaaagtaaaactgaggtgggaaattaaagaaaaataaaattaaaaagaaagggaaataagctttcttgtattaagctaacttgtcccagaggcagcaacaggcacagcccagacccaggaaaagtcttgataatattatttattgtattctggagactcttccagcactccttcaatgtagggagaagaaaaacaaattttcctttgttttatggtatgagtttatagattcttgttctctttaactagtaacttcaagtattctgttttatctaagaagtatggcaaaggtcatgagaagcctgagcaggcctgaactacagctctctaggcaccatagtgaagataaaccaatgcaagcctctttagagcaaaacctagataatagacatctgggttgcatagcaacagttatgtgcaatcctgagttatgaacctgttacaatttgattaactgtctttttcctgcctctgtatccctgctttcacaccactgtaagcttgcttcaagctggcccacccccttttgtgaagtgtgtataaaagtcaagtgctgtctttgttccaggccctgtctttggacgtgagtctgctgggcctgagagcactcaataaaagattctcctgttttaacccaaagcctctctctcatcctcctaaatcccacaacaaaaccacaatgagatgctatcttaatcttgctagaagcccataatttaaaagtcagaaaacaatagatgttggcatagatgtggtcaaaagggagcactttgacactgctagtgggaatttaaactagtccgaccactatggtaaacagtatggggattccttaaagaactaaaagtagaccattcattccagcaatcccattactggctatctacccaaaggaaaagaagttattccataaaaaagacacaagaatatggatgtttatagcagccgattcgcaattgcagtgatatgggaccaacttaagtgcccatcaacgaacgagtggataaagcaaatgtggtacaccatggaataatacttgataataaaaaggaacaaaataatgtcctttgcaacaagttggatggaactggaagccattattctaagtgaagtaactgaggaatggcaaatcaaatattgaatgttttcacttttaaatgagagttaagctatgagaatgcaaaggcataagaatgatataatggacttggggactcagggggaaaggttgggagggggatgaggaataaatgatgacatattgggtatattatacactgctcaggagacagatgcctcaaaatctcagaaattaccactaaggaacttttatccacataaccaaaaaccacatatattccacacactattgaaagaaacataaacattattttaaaaaataaagccacttttaaaattagcaaaataaaataaatatgtcttcagagtttagatattggatccaaattagacagatcaaatactgcctttactaaatattttcatgtcattaacaacttctaaaacctttcaaacagttttttgacatgtcttggaaccatccatttctagctaaggcctgggcacctgtgaaatagggccatgcccccccttatactgggaagagtaagatatttcaagactaagatgttttctacagctccatctttttctttaagctctacatcaaggacataattaaaattggttgtctcctaagtggtttactaaaaatgcatacttaagagttaccattataattaatatttgtatctaaagctacttaaaaattttcacacacaaatctgactgaacaagtaaaatatattttaagtcaaagtttataaaaggacatgagaacatagcttttatgaaaaaattagttttgtcaagtttagaggttttcaaatattttaaattcaggaaataaaataacaaaaagacaaaagaaaatggttgaacaacttagaaaaggtttgttaaaattcatcttataaaacaatctacatgtaaaaagtgggctaaaatttgaaagagattatttaggttttccataaattaatccagaaggggtaggaagtcttaagaatgaggaaggacaggaggaaggggaggtcatcctgacactgcagaggcagaagtgcagctgaaggtatgaaggctaagaggggaggggagtttgagtgctgctgcctggctgtcagagcagaggagggtcctgggcaccagacttgaggaagggatgaaaatgctgggcagacctgtagtgggcccttgagatggcagatagtggtttccagagagagggccattgttttccagtgcccagcactgagcagagagagttttgggcagtgtaaaaaaaaaaagagaacttacctctttctcgttttagaaaaagaacagtctaagaatatcagcagggaaactctcagtgcttcaaggggttaaacgcccttttggctttcttgtgttggtttcatcatagaggaggagaaacttcttggaagtgttcctaaaaacacaacacgtctgcttctcctttcaaaaaaggaagtgctaaaacacgaacactctagatccaaatattaatacggatgtctaaatgcttccgttttccaaggggcagaaagctaaaggttgtaacctattcatttcagtcaaagttggtgaaagggaagcaaaggaactgggtggggcttggaaggatgacgaagctcaagctcattggccagcaacctctctcctgggggcgggaggggtgagcatacgtcattgctttggcttctataaaatgaggaggactcaccgagtgtgaagagtccttctggtgattgcagctgagagcacactcacgacgttctgcaaggattctctgattatgattctgaagggaaaagcgatggaatggacagcagagattgtaattttctttatcttgaattacggaagaaagtatctaggacagaaatccacgacaagtccttggaaccagcagatctcttcgttcacggagacgttgacgtattctctattgaagaagattcttaccttcttactggacaaggttttgtcagttctgcgtgactggattgtccgggagactctgaggaaactgatgtcacatgtttttccaaagaagatgtttctggaaccaacaactgtgattgtggtttgaggacttctgagagttccagtacaggaaataagcagaacatcagctggaggctaaacggatccagacttcactcttcacttcccttcctattcagtctattgtgcctgctgactgagaagcttggctggtatgtgagcaaataaacggaactattcagaaggagatgttgacatattctgtattgaagaagatccttatcttctcacctgacaaggttttgtcagttctgtgtgactggattgtccggaagactctgaggaaactgatgtcacatgtttttccaaagaagatgtttctggaaccaacaactgtgattgtggtttgaggacgcctgggagttccggtatgcgaaataagcagaacatcagctggcggctgaagggatgcagcctccactcttcacttcccttgccattccatctattgtgtctgcctgactgagaagcttggctggtatgtgaggaaataaacggaattataaacaaggagattgtttctcatctacttcattctgttgtggcttttctattttggggttcagggtgtgtgacaaggaccaaggagatgaaaggtttcatgatggagaaagcccaggcaatcagattgaagagctatccacagggaatcttggctgctgaggggctgcaccctgcaacggactgaccatatgacagaaaagggttttaaaggctcaacttctggactgagaacccagagtaatttgggaacctcctctgtgaggagatatgaaagctgggaatcatgacatccctaggaatggaaggcacatttcctgatggaaggggtgctttggaaaacaggagcagagtagacacagcagccttgtggatacgggtgggcagcatgcatgggtgatgtgaacgtggagtgtttgtgatcgaaactcaaaatgtctgacaaagtgaaaacctagaaaccacaatgaggaggaagagtttgtgagggcaatcactctccccatgtgtgaaaatcgggggctcttaaaatctcatctggagaggtgcagtctaccaaactctgggactttagcctccccttttaaaaaaccgtgcatcaataccaacgtccgaaaccacagaaataacacctggcttgcatggagacaaggacaaaaagccgtcatgatgagttgttctgctcacttgctgcctctgttcagtgcacaggatattgtccacccactagcaggctactgcaagagaagtgtgcaatatgttccctatgtgccatatatgtgccatatggcccatatgacaactgagtcagaaaatatctgatgccctcagagttacactccacctggagcttgcccccagccatccaggacctaggctccctaccctgtccaattttctggtgttttgggggcttcattctctaaggtgtgcccactctttactcaaaccaaaacacccacatattcctgcccatgaacaaccaatcaaccacttctcagttccacatcctgctgttgggtctctagtggtgacactgtaactcccaggtcatagtggtgacactataacacctagctaaattgatgccttgtctctaggaggccatgggctcctgcaggtctcatctgactctctgtagccttccctgacaatgctcacaatacccaagccagagccacattgacagcaagctgctctcatcttacctttgccagacctggccactggaaaaggctgaccctcatcctgcaatgcctatacctccaacctttgtctcaagctggtgtcctggagggacttctaagcagaaaacagattcagactcccatcctctcctgaatggcctcatatccaattctcagaccctcagccttcattgtaaggacacttcatccatgcccttgagtattctgtctgcactgtgtattctgcaatagattctcctccctctgcgaccctcaactccttccgcagactttttgttttcttgatcatctaccatagtcttccactgggacactgccaagcccattctggagagtgagttgtgcaagtacactgccccccatctacctttcgggaggtgtatacacccttctttctcccaggtctggaggctttctattttcatcctgaggcatctccacctgctcttggattcttcaaattgacaaccaccagttaacaagaactatgtgtcaccaaatagccaaacaatggcaattacaaaaataaaattaatagctgtaacccccattagcaaggatacacaaatcaaatcagggatagtgggtgaggaagtctgcctaacattcaaggaaggattctgaagtgatacaaaatcattgcctttgctatctttagaatggacactttcagccaggcacagttgctcagcctgtaatcccagcactctgagagccccagttgggtggatcacttgaggccagcagcttgagaccaccctgggcaatgtgcagaaaccccaactctactaaaaatacaaaaatagccagttattgtggcacatgcctgtaatcccaactccttgggaggctgaggcacaagaatcacttgaatctgggagccagagtttgtaatgagcgaagatcatgccactgcactctagcctaggcattagagtgataatctgtctgtggaaaataaaaacattcctcttcaaagttttcttctttaaatcataaatgttggaattaatatatcctctttgaaactcactttcttcaagcttctttatttgatggtagtaaatctttgttaagctttatgaggcaagagtaatggaagaagcatattatatatatttatactctaacctcagtgcttgttctagcaagctcaggcatgcgtgaatgtgcccaggcatgttccagcccataccttatatcctttccttattgggaaatgctgttactcctataagcattcttgtaagcaacttcctctttttctttgtctccactatctttacctattgaggacagttttaggttcttagccagttggatgtagcatagactgtgaggtccaaccccagccaatggagatagcacacagcagtagcgacctcatgcttaacagataaatattcctgtctccctttgtttggggtgctctcagctgatgagcaacaccctttctaaagaaattaaagttgtcttgctgagaaaacttttggtctaaatgctgattcttccttgcagcactgaagaagaagcaattatttccaacactttctcatacacaaaaaaagaagaaggtggaagaaaactttcttgtgcaccctatccctcactcagaaagacaacagaaggctcctagtggcaagccctagaggattcatttcttttgggaaccctcttggctgggatactaggactcaggtcaaactcagcattttcagtgtgtgggaagtgtgcttgggtttcactgttacttccaataatgtgatttggtccttggggttcaccaaattttggtatggagtggtgaaccctgttaagtttaagtgtctataaaattaacaaagcaaaataaccattctgccccatggttcagagaccaaatattgtgtaggaaatgctttagcgagagaaacagagaagaataaaaaatgtcctcaagcgctgcattatttcttgttatcgtccagatcttagaggaaaggctttcattttccctcattcagtatgatattagctgtgcatctgtcatttatggcttttattatgttggggtatgttccctgtgtatgtagttttttcagggtttttgttatgaagtgatgttgaactttatcaaacgtttttcagtttcagttgaaacgatcatatgctttttgtccttcattctcttgatatgatgcatcatgttgatgatttccatatggtgcactgtccttgcatcctgggcatgaattccacttgatcatgacaaatgaatttttaatgcattcttgaattccgtttgctggtattttgttgaggatttttgcatcaatattcatcagagatattggcctgcagtttctttttttttcttttttctttgttttgttgtttgtttgtttgtttgttttgatgtgtctatgtctggttttggtatctgggtagtagtgttccatccccttttattttttagaataatttgaataagactggtgttggttctttaaatatttggtagaattccgaagtgaagtcattgggccccgggcttttctttagtggaaggctgtttattatggcttcaatctcgttacttattattggtctattcatgttttgaatttgttccttatttaatcttggtaggctgtgtgtatctaggaatttgtccatttcttttagattttcaaatttattggcacataattgcccattgtagcctctaatcgtcatttgagttcctgcagtaccaattataatgtctccttcttcatttttgattgtatttatttggatcctgcccctttttttcttacttaggctgcctaataatttcttaattttgttgaactttttcttttgtttgtctcgctctgccaccaggctggagtgtagtggtgtgatcttggctcactggaacctccgtctcccaggttcaagcaattctcctgcctcaccctcccaaatagctgggactacaggcaagtgccaccactcccagctaatttttgtatttttagtagacacgggttttcaccatgttggccaggatggtctcgatctcttgacttcataatccacctgcctcagcctcccaaagtgctgggattacaggcatgagccactgcgcccagcctaattttgtttaaattttcaagaaatcaacttcttctttcattgatttctgtattttttatttccattttatttatttaaactctaagctttattctatcttcttctcattttagctttggtatgcttattgcctctctagctctttaatgtgcattgttagattgtttatttgaagttcttcctctctacaccataagacgtaagcatgtcctcattatgtcataagatgtaaccacttacagctataaacttccttcttagttctgcttttgctgtatctcataggctttgttatgttgtgtttccattatcaattgtgtcagaaatttttcaatatttttcttaatttcttcattgagcaactgatcatttgggagcatatttttaaacttccatgtacttacatagtttccaaaatacctcttgtgatcaatttctagttttattccactatggttcaagaagatgcttgatattatttcaattttttttcacattttaagatgtgttttgtgacctaacatatggtctactttttttttttattaaactttaagttgtggggtacatgtgtagaccgtgcagttttgttacataggtatacacgtgccatggtggtttgctgctcccattaacctgtcatctacattaggtacttctcataatgctatccctcccctaacctccaccctctgacaggacctggtgtgtgatgttcccctccctgtgtccatgtgatctatttttgagaatgatccatgtggattagaatgctgtggaaaagactttggattcctaatatccagggagggagacgatgatattactttcaatatcacacgggtgtacacactctctgtgacattgttcctaatatccagtggaagagaggatgatataacacccagggagggagaggatgatattactcttaatattgcagggtgtgtacccatgcctatgatattgttcctaatatcaggagggggagaggatgatattactcagaatatggcagggggtgtacacacactctgtgacatggttcttaatatacaggggagaatgggacaatattactctcaatatcgcagggggcgtacaaccctgtgatttgttcctaatatacaaaaggggacagtatgatattgttcctaaaatcgcagaaggtgtacaacgccctgtgatattgttcctaatatccagggcgggagaggatgatattacccccaatatcacagggggtgtgcactttccctgttacattgttcctatgatccgagtggggggaaatgacattagtcccaatatcgcaggatgtgtacactactcccccatgatattgttcctaatatcaagggggagagaggaggatattactcccaatatcgcaagggaggtacatcctccatgcaatattgttcgtaatattcaggaggagagaggaagatattactctcaatatcgcagaaagtggacacccaccctgtgatgttcttcataatatccagggaagcagacgattatatgactttcaatatcgctgggagtgtacatcccttttgggatattgtttctaatatccaggaagggagaggattatattacttccagtattgcagccagtgtacacatttcttgtgatattgttcctaatatccagaaagggaaaggatgatattactcccaatattgcaggtggtgtacacccccctctgatattgttccttacatcaaggaaaagaaagaagaatattactcccaatatcgaagagagtgtacacccctcctgtgatattgtatttaatatccatggggaaagaggatgttgttactcccaatatcgcagggggtttacacccacactgtgatattgttcctaaaatccagtgaaggagaaaataatattgctcccaatattgcagggtgtatacaggccctcccccgttatattgctcctaatatccagcggtggagaggatattactttcaatttttgcagggagtgtgtaccccctctctgatatttttctaatatcaaggatgggaaaggatgccattactcccaatatcgcaggaggtgtacatgccctgtgatattgttcctaatatccagggaggtagaggatgatattactttcaatattgcaggggctgtacaccctctatgatgttgttattaatatttaggttgggagaaaatgatatttttcctaatatcctgggaaggaaaggatgatattactgtaaatattccagggagtgtacaccttcctaatattctaatattgttcctaatatccaggggtgggagaggattatattactcccaatatcgcagtgggtgtacacccctcctgtgatgttgtttctaatatccaagcgaggagaaaatgatatcactctcaataccgcagggggtgtacaccttccccatcatatcgttcctaatattcagagggaaagaagatgatgttactttcaatatcgcaggggttgtacacaacccctgtgatatttctcctaatatccaggaagaaagaggatgatattgctcccattatagcagacggtatacgcctccctgtaacattgtttctaatatcaagactgggagaggatgatatcacttccagtatcgcaaggggtgtacacctcccccgtgatattgttactaatatccagggggaagaggataatattactttcaatattgcaggggctgtacacccccgtgatattgttgttaatatttaggttgggagaaaatgatattagtccaaatatcgcagagagtgtacacacttccgataatattgttcttaatatccatgggggagacgatgatattacacccaatatcgcagggggtgtagtctccccttgtgatattgtccctaatattcagggaagtaaacgatgatgttagtgtgaatattccagggagtgtacaccccctttgtgatattgtcctaatatccgcaggagagaagataatattactcccaatatcgcagggggtgaacacaccccctgtgatattgtttctaatatccaagcgaggagaaaataatattactcccaatgtctcaggggatatacaccttccctatgatattgtttctaatattcaggtggaaaacgggtgatattactcctaatatccaggaagaaaggggattatgttactccccttatagcagggggtatacacctcccctgtaatattgttcctaatatcaaggctgggatatacgtggggggaaggatgatattactcccaatatcacaggggttataaaaccttctgtgatattgctcctaataaccatggcggaagaagatgatattactcctaatattgcaggaggtgtacactcccccattatgttgttcctagtatgcagaaaaggagaggatgacattattgccaatatcgcagggtgtgtacaccacccatgatattgttcctaatatttagagggacagaggatgatattactcccaatatcgcagggggtgtacacgcatcccctgtgatattgttcttgaaatcgaggggaaagagaattatatttctctaaatattgcagagggtgtacaccgccccctgtgatattgttcctaatagccgggggcggggggagataattaaattactttcaatatctcagagagtgtacatcccccttgtgacattgttcctaatatccagagcaaaagagaatgatattcctcccagtatcgcaggaagtgtacatttaacctgtaatattgtttctaatatccagggggaagagaatagtaatactcccaatatcgtaggggttgtacaccttttctgtgatattgttgcaaatatttagaagagagagagaatattactcgcaatatcacagggaatgtatacttcccctgtgatattgttctaatatctagaaaaagagaggataatattactcctaatattgcagggggtgtacacccccacttgtgatattgttcctaatataaaggaaggtcgaaaaacaaacggggagcccagggggaaggaaggcaggcgaggaagaggcagcgccggggcgccggagggagcagccgggccgcggaagcgcgagcacgagaccggtcgcggtcgcagtcgcatttttgccgttgtcgcggccgccgccgccgaggcttacccggggatgtctgagcccgcgcctcgcggcccccaagctccacgctgcgcccgctgtcccggcctctaagggccgccacgtccctgcggcgcgcgcaggcagaaagcggcttcgtgccggcggagggggcccgggcgggccgggaaaggctgccccaggccccgcgcctaccccatcaccgcggccggcgccgggccgggaggatgagcggtgtggggctctgaagcatggagggggttttgtacaagtggaccaactatctcacaggttggcagcctcgttggtttgttttagataatggaatcttatcctattatgattcacaagatgatgtttgcaaagggagcaaaggaagcataaagatggcagtttgtgaaattaaaggtgacagctttggaggggaccacccttgattggatacataaattctgttcattcagcagacaacacaagaatggaattaatcattcctggagagcagcatttctacatgaaggcagtgaacgcagctgaaagacagaggtggctggtcgctctggggagctccaaagcatgtttgactgatacaaggactaaaaacgaaaaagaaagaagtgaaaccagtgaatcgctgaaaaccaaaatgtctgaacttcgcctctactgtgacctcttaatgcagcaagttcatacgatacaggaatttgttcaccacgatgagaatcattcatctcctagtgcagagaacatcaatgaagcctcttctctgcttagtgccacgtgtaacacgttcatcacaacgcttgaggaatgtgtgaagatagccaatgccaggtttaaacctgagatgtttcaacggcaccatccggatcccttagtttctcctgtgtcaccttctcctgttcaaatgaggaagcgttctgtcagccaccctggttcttgcaccagggaggagtagccactgtataaaagaaccagtatctgcacttcaccgactctcccagcgacgccgaagaacctactcagatacagattcttgtagtgatattcctcttgaagacccagatagacctgttcactgttcaaaaaatacacttaatggagatttggcatcagcaaccattcctgaagaaagcagacttatggccaaaaaacaatctgaatcagaagatactcttccatccttctcttcctgaagaaactgtagtgtccaactttctctaagtattgctatgcaaaagctgctgtaattgaactattgttatagggagtagttttttcccttaggactctgcactttatagaatattgtaaaacagacaaacaagaaaacaaaccacatacttttgaagcgtgttttatctttatatagtttgtttgcaagagtattttcctaataacttcacagtatgaatgtgcatcttttttttctttttttaacaaatgatggtgtaacattttgacatccataaggacaaatgtagatatttttctaaaaaaccgtgaggggactgacagcttggtcagggtgtattgtagcttataaacatgaaatcttacaaggtttcagtttgacagaagtgtgatatatgtaacttgtgccatggaccaaatggtcactttaccacagctaaaaatgagttatgatagcagcttgatggtgattgcattgtattcctttaatcaaaaaggaaacgcaatattctaagtatctttagcccaaataccatgacatattgagcatctttaaataaccagactgtattgtccttcatatgtgaagttgacactactgatttgtcaataccaaattttgggttaaagtgtttaatttttatttatttattttcttgttgcctcaaaagatgattgcattctaacttttgtgacctaccaaatttaagatgtgtatacattgttctttacgttgttctagaaaagagattttaatgctgtagtgacttagctcacttacatcagagaaataaacaactttcaatggaaaaaaatatatataaaggaaggaagaggatgatattacttctcatatagaaggggttgtacaccccccttgtgatattgttcctaatattcagggagggagaggattatattactcccaatatagcagggagtgtacacccccccccccgtgataatgttcctaatattcagggaagcagaggatgatattactttcaatatcacagggggtgtgctgtccccctgttatattgttcttaatattcaggggggagaggatattattatgcccgatatcacaggagaagtacaccccacaagtgatattgttcctaatatccaggggtaaagaggatgatatcgcaggtggtgtacacccctccccgtgatattgtttctaatataaagaaggagagagcatgatattactcccaatatcgctggaggtctacaccccccttgtgatactgttcctaatatccaggaagggaaacaatgatattgctgtgaatattccagggggtgtacacccctttgtaatattgttcctcatatccagggggtagagaggatgatattactcccaatatcgcagggggtgcacggccccactgtgatattgtttttcatatccaggaggggagaggatgacattactctcaatatggcagggggcgaacaccccctgtgatattgtgctagttaggttgggagaaaatgatattactcccaatatcgcagggggtgtacaccgctcctgtgatattgttcctaatatccatgacgggagaggatattactcccaatatcgcagggggtgtacctctcccctgtgggattgttcacagtatccaaaagggaagaggatgatgttactcccaatatcacagggagtgtacaccaccattgtgatattgttcctaatagccagggaagaaaacgatgatattattgtgaatattacagggggtgtacacaccccctgtgatatggtttttaatatacaggttggaaaaggatgatattactcccaatatcacaaaaggtgtacacacccccccatgatattgttcttaatacttcggtggggagaaaatgatattagtctccatatcacaggggtgtgaactcctccggtgatattgtttttaatatcaagaggggaggagatgatattgctttcaatatcgctgggggtgtacatccctcctgtgatattgttccttatatccaggcgaggggaaaataatattactcccaatagtacacaccccatgtggtattgttcctaatactcagggggaaagaagataatattactttcaatatcacagggtttgtacacctttcctgtggtatagttttcaatatccagggggaaggtacatgatattactcccattgcagcaaggggtgtacacacctcctgtgatattgttcctaatatccagaagtggtgaggatgatattactcccagggggtgtacaccccacctatgatattgtttctaatatccaggggaaaagagtgtgatattatgcccaatatcgcagagggtgtacacttatcctgggatattgtttctagtatttggggagggaggagaggatgctattattctcaatatcgcagaaattgtacacccccgctgtgatattcttcataataatcagggaaaaagaggatgatattactaccaatattgcagggggttacacttcccctttggtagtgttcctaatatccaggaagaaagaggatgatattaatcccattttccaggaagtgtacacccaccgtgtcatgttgttcctaatatccagcagggaagaggatgatattactcccaatatcggagagggtgtacacttcccctgttatattgtttctaatacccagggggaagaaggatgacattactgccaatatcacagggtgtgtaccccaccctgctattgttcctaatattcaaaaggaaagatgaaaatattactcccaatatctcagggtgtgtacacctctcctgtgatatcgttcctaatatccacaggaagagagaatattactctcaatattgcaggggggtgtacacccccctgtgatattgttccaaatattcgggcggggagaggatgatattagtcccaatatcgcagggggtgtgcaccaacctgtgatattgttcctaatatccatgcgggggaggacgatatcactctcaatgtcgcaggaagtgtacacctctcttgttatatttttcttaatatccaggagggaaaagatgatattactgccaatatcgcagggtgtgtccaccccccttttatattgttcctaatatccaatggaaaagaggatgacattgctctccatatcccagaaggtgtacaacgcccctgtaatattgttcctaatattttgggggaagagaggatgatataacttataatatcacaggaggtgtacaccacccctatgtattgttcctaatatcctttaagggagaggatgatattactcccaatatctcaggtggtgcctattccccctgtgatattgtttttaatatccaggggaagagagtatgatattacgcccaatatcgcagggggcatacaccctctctgagatattgttcataatatatagagggagagaggatgatattacttccaatatcagaggtggggtacaccccccggttatattattcttgatatccaggaggggagaggttgatattactggatatatagcagggagtgttcacatcttctgtgatactgttcctaatatccagaaaagtagaggatgatattactcccaatatcgcagaacgtgtacacctccctgtgatattgatcctaacattcaaaggggagaggatgatattactcaaaacatcacagggcatgtacactcccctgtgatattgttcctagtatccagaagggagcaagataatattactttcaatatcgcagggggtgtacacccctctttggtatgtttcctaatatccagaaggaaagagggtgctattactttccatattgcaaggggtgtacacccccctgtggtatggttcataatatccagggagggaaagggtgctattattccccatatcgcgaggcatgtacaccctgctgcggtacggttcctaatatccagggggaaagaggatgctattacttcccatatcgcggggtgtgtacacccccgtgtggtatgttttgtaatctccgggaacgaagagggtgttattacccctcatatcgctggaaatgtacactcccctgtggtacggttcacaatatccaggggattgagggtgctattactccccatatcgcggggggagtgcacctccctgtggtatggttcgaaatatccagggtaagagagggtgctattattccccattttgcaggaggcgtacacccctctatggtatgttttgtaatatcccaggtaaggggtgctattgagagaagagagcaaaagaccccccccatattgttctgtattattttatactcagtacctgttttaagaagaaacaaggaagcgaaaccaaaggcaggcagcccggcgccaggcaccagatccaaaaccagacccgaaaccaggcctgggccttcctgaccttagcctgaaagttaaaattcaacccatgacctagcaactgatgttatccatagattccagacattgtatggaaggacattgtgaaatttcttgttctgttctgtttcactctgagtactggtgcatgcagcccttgtcacatacccactagattgctcaatcaatcatggccctttcatgtaaaaaccttagtgttgtgagcccttaaaaaggacagaaattgtgcactcaacaagcttggattttgatactctagtctgctgatgcttccagctgattaaaagccacttccttcactacctcggtgtctgtgggattttgtccgcggctcctcctgctacactgtgactccccttatagagaggggtgtacacccccctttggttcctaatatccagcgggggagtaggtgctattactccccatattgcggggagtgtacacccccttgtagtacggatcgtaaaatcaaggagggagagaaggtgtaattatccccatatcacagggagtgtacacccctttgtggtatagtttgtaatatccacgacgggagagaatgctattactccccatatcgtggagggtgtacaccgccctgtagtatggttcgtaatatccggaaggggagaggttgctattactccccatatggtgggaagtgtacacccccatgtgatatggttcataatatccaggggggtagaggatgatattacccacaatatcatagaaggtgcacacccttttgtgatattgtccataaaatccagaaggggagaggatgatattacttccaatatcacagggggtgtgtagccccatatgatattgtttgtaatatcaaggtagggagaggatgctattccttacaatagctcaaggggtgtaaccttcttgtgatattgtttgtaatatccagaaggggagaagataatttttttattttaaaagtaaactttaatgtcaaaaatgcaaacttgagaagggcagaaagatcaaacagaaggctgccacttcacaattggagggttgcacagtggccgggcagaggcgctcctcactccccagacggtgaggcagccgggcagaggtgctcctcacttccgagatgttgcaggagccgggcagaggtgctcctcacttcccagaacagggggctgccgggcagaggtgctcctcactgcccagacggtttgcaggcctggcagaggcactcctcacttcccaaacggagcagcggcaagccagaggcgctccacacttcccagatggtggggcagccgggcagaggcgatcctcacttctcagagggtagggcggcccagcagaggcgctcctcacttcccacatggtggggcggcaggctagaggcgatcctcacttcccagacggtggtgtggccatgcagaggtgctcctcacttcccagatggtgtggccgccgagctgaggcactcctcacttccctgacagtggggcggctgggcagaggcgctcctcacttcccagacacttggactccgggcagagactctcctcatttcccagatggtggggctgccgggcagaggcgctcctcacttcccagacggttcagaggccgggcagaggcgctctggggagaggataatgttactcccaatatcgcagggggtgcacactccctgtgatattgttccgaatatccagagggggaaaggatgatatagctcccaaaatcgtggggagtgtacacccccctgtgatcttgtttgtaataccaagaagaaaagagaatgctattatttccaatatagcagggggagtacaaccccctgtgatattgttcgtaatatctagggggagagaaaattatattagtcttaatatctcaggggacgttcatccccctgtaatattgttggtaatattcagaatggagaagatgatattgttcttaaaatacaggaaaaaatatgataatattacttccaatatcgaagggggtgtacactctcctgtgatattgttcccaatatccagaatgaaagaggatgctattactcccaatatcccagggagtgtacacccctttgccatattgttcataatatccaggggaagacaggataacattactcccaatatcaccgggggtgtccacccactagtgatatttattgttcatcatatccagaaaaggagaggatgatattactcccaatattgcaggtggtgtacggtccctgtgatattctttgaaatatctagaaaaggagaggatgatatcactccgagtatcacagggggtgtacacccccctgtgatattgttcgtaatatccaggggagaaaaggatgatataattgccaatatttcaggggatgtgcacctccctgtgatattgtttgtaatatccaggggtggagaggatgatattactcaaaataacgtaaacatcctgtgtgtacatcccctgtgatattgtttataatatccaggggggtagaagatgacattacccccaatatcacagagtgtacacacccctgggatactgttcataatatccaggcgggaaagaatgaactacttccaatatcgcaggatatgtacacccccctgtgatatatttcctaatatttatgtgggtaaggatattacccccaatatcacagaaggtgtacatcctctttgtgatattattcctaacatccaggaaaggagagaatgatattactcccagtatcgcagggggtgtacaccacccctgtgatattgttgctaatatccagggggagaggataatattactcccaaaatcacaggggacgtacactcctcctgagatattgttcctaatattcatggggaaaagaatgctactactccaaatacagcagagggtgtacaccatccccgtgatattgttttttatatccaaagggtgaaaggctgatattactcccaatatcgcagggggtgtacaggccccccatgatatcattcttaatatccagggaggcaaagaatgatgttactcccaatattgcaggctgtatacaccccccgtgatattgttcctaatatccagagtaagagaggatgacattgctcccaatattgcaggggttgcacgcacgccctgtgataatattactcccaatatcaacagtgggtgtacactcctcctgtgatattgtttgttatatctaagaaagaagaggatgatattactgtcaatatcacagaaggtgtacagccccttgtgatgttgtttctaatatccagcggtgagaggatggtattactcgcaatattgtagggggtgtccaacggccctgtgatattgtttctcatattcaaaaaggaaaagaataatataactccaaatatcgcagggtgtgtacacttccctgtgatattgatcctaatatccaggaagagagaggatgatattaatcccaatatcacagggggtgtacatcgcttctgtgatattcttcctaatatccagggggggaggggatgctattactcttaaaatcgcagggaacttacactcccactatgatatttttcctaatatccaggaagggagaaaatgatattactcctaatatcacatatcacaatgggtgtacatctccccgtgatattgtttctaatatcaaggatgggagaaaattatattactctcaatatcgcagggggtgtgcacacctcctgtgatattgttcctagtatccagcggaggagatgatattactttaaatattgtagaaggtgtacaacccccctttgatattgttcctaatatccagggggaaaggagatgatattactcctaatatcgcaggggctgtacaaccctatgtgatattgtttcttctaatatccaggggtggagaagataatattactcctaaaatcgaaggggacatacactccccctgtgatatttttcctaatatccagaaggaaagaggatgatattactcctaatattacaagaaatgtatacctgtcctgtgatattgttcctaatatccagaggggtaaatgattatattactcccaatatcgcaggggtgtacaccttccctgagatattgtttctaatatgcagtggaggagaggatggtattactcccaacatcacaggagatgtaaactccccttgtgatattcttcctaatgttcaggacgaaggagggtaatattactcactgtattgcagcagggggtgtagagccccctgtgatattgtttttaatattcaaggttggagaaaataatattccttccaatatcgcatggggtgtacacccttctttttatatagtttctaatatctggggggagaggatgatattactcccaatatcgcagggggattacacccccactgtgatattgtttttaatatccagggtgggagaggataatattactccaaatatcccagggctatacaccctccgtgtgatattgtttctaatatccagaggaagagaagatgatattactcccaatgtcacagggtgtgtacaggccttctttgatattgttcttaatatccatgagggagaggatgatattactcccaatatcgcaaagactgtacaccctttctgtgatattgcttccaatatccagggagggagaggatattacactcaggatcacagggggtgtacaccccaacctgtgatattgtttctaatatctagggaaaatgagggtgatattactatcaatatcacaggaggtgtacactcccttatgatattgttcctaatatccaggagaatgacaggataatattactcccaatatcgcgggtggtgtctccccccactccgtgatattgttcctaatacccagagggggagagaatcatattactcccaatatcgcaggggatgtacacctacatccggcggagtagaagataatattactcacaatatcgcaagaagtgttcaccttccctgttatattgttgctaatatccagggagtgagaagatgatattactttcaatactgagcgtgtacactacccctgtgatattgtttctcatatccagtagaggagaaaatcatgttactcccaatattgcaggggtgaacacctcctttgtgatatttttcctaatatcaggaaagggagagtatgatattacccttaatattgacaggggtgtacacccccctttgatattgttccaatatccaggggggcagaggataatattattcccaatatcgcagagggtgtacaccccccgtgatattgttcctaatatccagagaaataaaaaatagtattatttccaatatcacagggcgtacattttccctgtaattttgttcctaatatctggggggtggggtggcaggataatattactctcaatattggagagggtgtacacccccctgtgatattgttcctaatattcagggtgggagagaatgatgttactcccaatatctcaggagtcgtatacacccccttgtgatattttttctaatatccaggaggcagaggatgatattgctcccaatatcgcagggggtatacacccgagctgtgatattgtttctaatatgcaatatgggggaaggatgattttactttcaatatcgcagggaatgtacactttccttgtgattttgttcctaatatccaggggtggagaagatgctattactatattactcctcatatcgcaggcggtgtacaactccctgtgatatggttcagaatatccagagtgaaaaaggagggtgacattactcccaatatcgggggggtgtacacccctttgtgatgtggttggtaatatccaggggggcagatgagggtgatatcactccccatatcgtggaaggcgtccacttttttgtgatgtggttctttatatcccgaggggagaaggtgatattactccccatatcgcgaagggcatacacccccctgtgatatagctcataatattccggagagtggaggaagatactatgccctatatcgcgggtggcctacaaccccctatggtttggcttataatatccaggggggagagggtaatattgctccccatattgtggagacgtacagccccctgtgatatggtttgtaatatctttggggggcgagggtgatattactccccatatcgcggggagcatacacccccgtgatctggttcatagtatctcaaaggaagaagttgatgtgtacaacttaagggaaaaagttgaagtgaagtgtacacacgccctgtgacgtggttcataatatccaggcgggggagaggagagtgatatttactccccatatcgcgggtgttgtaaactcccctgtgatatagttcataatatccaggggagagaggagggtgatattgctcctcatatcgcgaagggtgtacaaccccctgtgatatggttcataatatccagaagggtagaggacgatgatattactccacatatcttgggaggtgtgatatggttcgtaatatccagcgatgagagaatgatattactccccatatcgcaaaaggtgtgatagggtttgtaatatcctgagggggagagggtgatattaatccctatattgcagaaggactacaccctcccatgacatggtttgtaatatcccagggggtagagtgtgatattactttccatatcacagggggtgtgatatgattcgtaatattcgaagggggagagggtgacactactctccatatcacggggtgtgtgatatggttcttaatatcccaggggttagaggttgatattaccccctttttggggggtgtgtacaccccctgtgatatggttcgtaatatcccgggggagacagggtgacattattccccatatcgaggggatcgtacaccccctgtggtgtggttcataatatccctagggggagatggtgatattactccccatatcagggggcgtgcactcttctgtggtataattagtaatatccagggggcagaggtcgatattcgtttccatatcatgaagggagtacacttccctgtgatatggttcctaatatccaggggggagagggtgatattattccccatattgcggggggacatacaacccctgtgatatggttcataataaccagaaaagaagagggtgatattaatccccgtattgcagagggcatacaccccccctgtgatatggtttgtaatatctaggggaggaaaaggtgatattactttccatattgctgggtgcagacacccctttatgatatggttcataatatccaagttggagagggtgatattacttcccatatcatgggaggtatacccttccctgtgatatggttcgtaatatccagaaggggagagattgatattactccccatattgtggggggcgtacaccttcctgtgatacggtttgtaatatctaggggatatagtgggtgatattactcaccatatcacgggggttgtaacatggtttgtaatatccaggggaggagagggtaatgttactccccatatctcggggcatgtacaccctcctgtgacatggttcgtaatatccaggtcgggagagggtgatattactcctcatattgccgggggtgtgttatggttcataatatcctggggaaggaggctgctatcactctccacatcttgggggatgtacactctcctgtgatatggttcataatatccagggtgggtgagggtaatattactccccatatcgcgggaagtgtacatacccctgtaatattgtttgtaatagaagagagggtgatattactccccacatcgcgggtggtgcccacccccctgtgatatggtttggaatatccagggggatgaggagggtgatattactccccatatctcggtgggagtacatccctctttgatcaagttcataatatccaaaaggaaacaggagagtgatattactccccatatcgccgggggtgtacacgggagggggagtacacccccggcgatatggtctgtaatatccagggaaggagaggagggtgatattactcaccatatcgcaggtggtctacatttacctgtgaaacagtttgtaatatccagggggggaaatgagaatgattttttttttttgagtctcactgtgtcacccaggttggagtgcagtggcacgatcttggctcactgcaacccccgcctcctggactcaagcaattctcctctcccagcctcctgaatagctgggactacaggcgcaccccacaacgtctggctaatttttgtatttttattagagacggggtttcaccatattggccaggctgatctcgaactcctgaccctgtgatccatccgcctcggcctccaaaagtgctgagattacagatgtgagccaccacgcatggcccaaggagaacgatattactccccatatcccagggggtgtatatccccctgtgatatggttcagaatatccggaaggaaagacagggatattacttcccatatcgcaaggggtgtgacatggttcgtaatatcccatgggggagagggtaatattactcttcgtattgtgaagggcatacactcccctgtgatacagttcataatattccggggagtagaggaagatattatgctccatatcgcgggtggcataagccccctgtggtttggttcataatatccagggaggagagggtaatattactccccatattgtggggacgtacaccctcctgtgatatggtttgtaatatcccagaggggagagagtgatattactccccatattgcagggacatacacccccctgtgatatggttcaaaatgtcttttttttttgaaggactggttctttatttcaaaaagacacttgtcaatattcattatcaaaacagttgcactattgatttctctttctcccaatcggccccaagtagaccacatcaaaggagagtacatattaagccaataagctgtaggatgtacacctaacagacctcctagaaaccttaccagaaaatggggacagggtagggaaagaaactttaaaagatcaacaaactgccagcccacggactgcaggggctgtcacagccagatggggtggccagggtgccacaaacccaaagaagcaaagtttcaaaataatataaaatttaaaaagttttgtacataagctattcaagatttctccagcactgactgatacaaagcacaatgagatggcacttgtagagacagcagcttcaaactcagaaaagggtaatgagatgagtttcacatggctaaatcagtggcaaaaacacaatcttctttctttctttctttctttcaaggaggcaagaaaagcaattaagtgctcacctcaacataaggggaacatgatccattctgtaagcagttgggagggggtagagatggaacaaaattttggtctcagaggtcttgccatcttaatttggtcacttctaatgaaaaaaataaaaaatagaaataacattatccaaaggtatcttaaagctgaaaacttgaacagcacattttttgttgttgttgtttggctaactcctcctggaaccacctttctggcttagctagtactttgtacagagcaatgaggcttcccatagtggagtctccctgggctctgtttggctctcagcaaggcaggcctataccttttcctctcctccatggagagaggaatatgcattaaggtgaaaaatcaccttccaaaagtgagaaagggattcgatcgctgcttcagggctgtggtattatatggaatgttttacaaaaggttgctacaaaacaacaaaagaggtaattacaaaatgtgtacatcacaacatactttttaaagacattatgcattgtgctcacattcccttaaatgttgtttccaaaggtgctcagcctctagcccagctggaatctccgggaagaggcggacagtttggtgaaaaagacacagggaaggagcgggcggcggaaggagggggcggcgaaaggagaaagcagccttccagttaaagatcagccctcaattaaaggtcagcttcgggcaggctggcctcaggcggagtctggttcagagggaggagcagcagcagggtgagactgaggcgttctacatctcattcaggtcaagcagagtctggtccagcatcctttgtgtacagaggtgctcccctttggtgcatttcagtttatcttccaagtcatcaattgtcttttccagcttggctaccgatctctcagcaaactcagcatgggtctccgcctcctttattttatcagtaagaatcttgatctcttcctcatatttgtcttctttttgagagtacttttcttcagcagcactcagacacttcaggttctggtccatcagtctaatctgctcatccatctctcggcaaagggattctgccagctcagctcgttcctctgtgcgttccaagtctccttcaatgatcaccaacttacgagccacctcttcatacttcctatctgcctcttctgcaatgtgcttagcttctctgagttggatttcctggagttccatcttttcttcatcttttaaggcccggttttcaataaccttcttacctctctcactctcatcagcagctttttccgcttcttccagcttttgcagggcagtagccaggtgctcctgagcacggtccagctcctcttcaaccagctggatcccacgttcaaggaggccacctcagcctcagcctgttcccgggcccacctttctccctcaacttctcgctggaggcgctcagctcgctcctctgcatcatctgcctgctgctgcagaacctggatcttgcgcttcaccgcctcgatggtggtgatcccagccatggtgcccacccagctactgctagagctccggttcctgcctcctccgatcggcgttgcagcctcctctcacccttacttccgcctcggttcaaaatatcttaagggaaggagttgatattactccccacatcacgggaagtttacatcccctggtgatatggtttgtaatatcccagggtggatagggtgatattactctccatatcgcgaaggagtactcccccctgtgatatggttcataatatccttggggggagagtgtgatattactccccatatcgcgagggccatatactcctttgtgacatggttcgaaatatcccggtgggggagggggtagagggtaatattactccccatacagcgaagagcatacgcccttctgtggcaaggttagtaatacttcagggaaaagagtgcaatattacttttcatattgcagggaacatacactcccctgtgacatggttcgtaatatcccgggggctgagagggtgatatttctccccatatcaccgggggcctacacctgggtgtgatatggctcataatatacagggagggagagggtgatattactccacataccgagtgaggggttacacaccctcgtgacatgttcgaaataccccaaggaggagacaatgatattactttccctgtcgcgggggctacaccctcccagtgatatggttcacaatatcccggggtggagagggtgatattactccctatatcaccggggggtgtacacttccctgggaaatggtttacagtatccccggggggagagggtactattactccccatatcacgttacatatcagggtacacccccacgtgatatggtttgtaacatcccaggaggaagaaaatgatattactccccatatcgcggtggcatacacccctccccgttaaatggttcataatatcttggggtggagagggtgatattactccccatatcacgtggggcatacaccccactatgatatggttcataatatcccggaggggagagggagatattactctccatgtcgcggggggcatatacacccctgtgatatggtttgtgatatcccgggggcggagagggagatattactctccatatcgtggggtcgtacacttttctgtgatatgattcgtaatatccagacggggagagggtgatattacttcccatattgcgggggcgtacacccctctgtgatatggttcataatatcccgaagaaaagagggtgatattactcctcatatcgcggggaacacacaccaccctgtgatatggtttgtaatattcagcgggggagagagtaatattactccctgtatctcggatggcgtacactcccctgtgatatggttcataatatccagaagaaaagagggtgatattactccccatattccagggaatgtacaccaccctttgaatatggttcgtaatatccaggaggggagagggtaatattgctcccaatatcgaaggaggtgttatacggttagtaatatccagagaaggagagggtgacattactccccacatcgtggtgggtgtgcacccacctgtgatatggttcataatattcaggttaagagaggtgatattgctttccatatcgccaagggtgtacactcccgtgaaatacagttcgtaatatccaaaaggggagagggtgatattactcccatatcgtggggggtgtacacccctctgtgatatggttcataatatccagggtggaataaggtggtattactccctgtatctcggggcatgtacatcgcctgtgatatgattcataatatccagaagaagagagggtgatattaatctccatattgctgggggtgtacaaccccctgttgtatggtttgttacactgagttggggagagggttacattactctcaatatcgagtggggcatacacacttatgtgatatggttcataatatcccagggaggagagggtgatattactccccatatcgcgggaggcatacaccccaatgtgatatggtttgtaatatctacatttttttttttgagacgaagtctcgctcttgtcccccaggctggagtatgatggccggatctcggctcactgcaacctcagcctcccgggttcaagcgattctcctgccttggtcccccaagaagttgggattacaggcgcacaccaccacgcccggctactttttgtatttttagtagagaaggggtttcaccatgttggccaggctggtctagaactcctgacctcagatgatccacctgcctcggcctcccaaagtgctgggattacaggcgtgagccactgcacctggcctggtttgtaatatctatgaagggggaaggtgatattactttccatatcacgggaggcgtacaccacgatgtgatatggtttgtaatatccagggggtatactgggtgatattactccccatatcgcggggagtgtatacccttttgtgatatggttcctaatattaagctgaggagaaggtaatattactccccatatcgcaggggtttttatatggttcataatattcaggaagagagagggtgacattactctccatatcacggggtgtgtactcccccatgtgatatggtttgtaatatccagggaaggagaggttaatattactccccatatcgcagggggtgtacacctctctgtggtttgtaatatccaaagggaagaggatgatattatcttcaatatcttggggggatacagtccccagtgatattgttcataatatccagagggggaggggatgatattactcccaatattgcaggtggtgtacaaccccctgtgatattctttataatatagagggggatgatgatattactcccaatatagtaaacaacctgtgtgtacaccccctgtgatattgtttataatatccaagggtggaaaggatgatattactcctcatatcgcagggggtgtatacccctctgtgacattgttcctaatattcaggggaggagaagatgatactactcctcatatcacaggggatgtacacccccctgtgatacttttggtaatatccaggggaggagaaaattatattattccccatgtcacagagggtgtacaccccgctgtgatagtgttcataatatccaggtgaaaagaggatgatattactccgaatatctcaggaagtgtacacccttctgtgatattgttcataatatccaaaggtggagaggaggatactactccccatatcgcagtgggtgtacacccccctgtgatatggttcataatatccaatgtaggagaggatgatattactttccatatcgcggagagtgtacatccccctgttatattgtttgtaatattcagggagaaagaggatactactactccccatatcacacggggtgtatattcccctgtgatatggttcctgatatccaagagatattataatcctctcttggattatgctacctctcatatcgcatggggtgtacacacactttgtgatatcgtttgtcatatccaaggagggagaggattatattaatcccaagatcacggggggtgtacaccctcctgtgatattgtttgtaatattaaggggggagaggataatattactcccaatataattaacaccctgtgtgtactcctccttgtaatattgttcataatatccaatgggggagacgatgatattactttcaatatcgcagaggatgtacatccctttgtaacaatgtttgtaatataaaaggcaagagaggatgatactacttccaaaattgcaggacatgtacaccccccggtgatattgttcctaatatccagtggggaagaggatgatagtagtcccaatatcgcaaagggtgtacacaccccctgggatattgttcctaatataaaaggaggagaggatgctattattcccaatatcacagaaggtgtaaaatcccctgtgatattgttcgtaatattcaggaggggagaggattatattactcccaatatcacagggtgtgtacacagggaggggcaagggccagaagcgggcgggaatccccatgtttgggcggacccagtttctaatggccagcatttgccaatcaaagcttaccagagaactctaaaagccagggctttcctgctagacaagactcatttctggaactgctttaaaaagaaacaaaacttcccaaggaccccttttcctctctgtctgcctaaaataatgttttaaaaactcctaaagcagctgaattcagcccccttcctgggggaatgtatagacggaactcccacctttcccggcatcccaaggccagagtatgtgaaactcctgggtctctatgtgtgtctgagcggctgctctgccaacactccacacagccctgtgtcctggacccaaggcccttatgacctgagctcaagaggggatctcctgatccatgggttgcaaagatccatgggagaagcatggtttctggggcggggtcacacgctcagtcactgtttccctcggatgccggagatggttcctttggctctctgccaatacagggtgaatcatcatccatccctcttttctttgttctcccgggtcaagttgtttgcctagtcagtcccaatgtgagaacctgaatatttcagttgacgcgctgacttcaaaatccccgggcttcgggaggcggagcttgcagtgagccgagatcccgccactgcactccagcctgggcgacagagcgagactccgtctcaaaaaaaaaaaaaaaaaaaaaaaaaaaaaagtccccgggcttttcttttcactcagtggaaggcagctgcttctaattggccatcttggcccgcccccaccacgtgaccttctgtaaaatgcctccactctccaggaacgctctcattatataactttgcctgaaaccaacagcacgctcattgcacatatcatgggctcatttatttcacttataaagaacctggccaaggaagagatagtgcctaaagtggccagtattctgaccgatatgttagaaaaatggtgtgccgaccaattcatgacatgtgtcccaaaactagcaacggaaattgtattcgccgtgttgaggtctctaatccagatgatgctcatctatgtactggaaaaggcagagtcctttcctgacaagctgctgaaactcttcagaaacatctcatatttcctgaagaagatgatgtctggacaagcagcacaggtcgttcagatttaactttctattcatatatccagcacgatattcgcacaattgtcacgaaaccttaccagttgatgagtcctgcacatttcctttaatttcaggaggaagagggtaatccggatgagttttctgacctactctgctgctgtgattaaacaaccaccaggaaattttgacgacactgttctcctgagctcctccctttcctccgggaacaaaacaattgaatttacaaaaataaagtgttatttgactggagtgaggtctcatgtctgcttatgcggtggctcgctgctcagaacagggtgagtctctgggttgtgtgctgaggaggggaggctctcaatctggagaaaacccactgcaggggacacctccatggggtctgagggactgaggatgaggagccggactgggtctagggaaggaggaggtttcagagggtgaaattctggcactaaagcctgggggtgtttgggaacttcctccttccgaagaagtttcagggagggataaagacaaaccctgggctccttgaggggcccttactaatttgagaggactctatcgggaaggagagtgacaatggcctccttgaggactgaggcccctgaataaatgaggcccagatacagtccatgggggatgagaccttcaagggtcacattttggttgggacagaggaaaagtgcagctctgcagccgcagaggaaaacccggcagtgtgaaagcgaccttggaggggccctgtgcgctctgaatgcgtctgagcccccatcccctgtccccgcctctctttctggattcttccagctcggctgtctccgccatcttctgagcgctccaccctgacttattcaagtttcccttctgccttccaagtactccaaaatctttcagatctgtgtccctacccctgtttttagcatgtgttggggctccaggtccctgaaggtttctggcctgaaatccacctccccagcggagtggactgcgttctagagactccacactccgcgaggttcccaggcccctgagggacaaccgagtggcctgcgcacttcagggctccacactcggcaaggtctttcaagcccttggggtccccttcttagttttttccacctttctgggctgcagtcactccataaatgctgggatctgatccccacccccactctcgtttcctcaattctgcgggctacacgctctggcaaggtcctccgggccctggatcccctccctctccctatgcccacgctcctagtcagcccttctggggtccactattttcaggaactaaccgttctcatggagccttgctaaccggaaagctgtgtggaagaaaggctttgaggatagaggtggagatttggctcttccatagtgccactcacccaccccaccatgctgccactgccagacccggacccctgtttcagaacaagtgaccagattcgctcctggacagccctggacactggccttttctctgaaaactactcaccctttctctagtccccacttcatgccagcctcataccctcttccttcccccacgctggcttccgggatcctcctctgctcagacaacctcttctgtgtcccacccccgtttttagaatgctttggggcaccaggttgggggaaggtttctggcctgatatccatctctttccaaactcccttcttcccttgaaaggcttcttgccttcagccccacttctggctccgaggtttcaggacaccctcctcttcatcctcattcttttgaccaccagctttttaggaattcgaacgtccctctcatcttcgtgaatcctgtccaggcatttgttgaccccttcatctgatacccctgacctcacattgccaaaagtctacccctacccagtacactggaattagacaaaatcccaggagttttacctcaactctgagtgtgcccacaggagctctccctgaagccacgtccttttaagcagggtctagggttcctcccttgtcttaatgaactctttgtcacacggaggacgttatggagcccttatgatctttcactgcctttctgcccagcgttttgtctttccatggacatttataatattttccatggacattttgttctctcaatgtccacccctaatttccaacatcccaaagattctcatgtgtttcctgaaagccatttacaggaatggctgtgcccagacccccttccccaggatcctccttcacacctggtaggtgcctctcctagagagatttgcactcagttgtcgtgcagtcacatggcccagatggttgttaatcacccccttcctggcaacagctagcagccagggaatcactggcacagaaacctcagggtgaccaagatgaggccacctctgtgctgaaggctgtgctccagagcctgcttgggatcaggcttaagcaggtcttcagccagacctgatgttacctggtttccttgagctgccctgcctgagctatcgggagcactccctcaatgcacatcttgattccctatctcatgctctgcttctagaaaccatgagctatcaattgctactggcaatggtcctgggaagtcaaccctaagtatggattctggggttggatgactccccacaggacttcagtgagcaacaatcactgctggcagttggaggacagagtcgctagggcatgtgaccactgtgaaaccaccgatgtttcacctggggtaattttggatgaactacggtagaagcactgaaggtacattgcttttggtttggaagattgtaggtaaataatagcgatatgaatgtggaattggatggctgcaaacgagtgccattgatgcattgaaagaggaaaagtcaggctgtcacctgtcactcagcaatttaaagtgtgagagttgggactagatgtggtggctcacatctataatccagagattcgggggaagcttgaagaggtaggatcttttgagtccaggagttccagaccagcctggacaccagagcaagacctcatctctacaacaaaattttcttaaaaattagatgggcttggtggcacgcacctgtacttgtagatctagctaatggggagcatgagataaaaaaatcacctgagtcagggacttaggggttacaatgaggtatgattgtgccagtgcacacactcccacctggccaacagagtgagattctgcttccaaaaaaataagaaataaatcaggtttgagagttggaaagcatcatcttctcctagagccaaaggacatgtacaactgagacccaggaacaaagcttcatcacaaagagaccatcatcagtggagccgggagatgcattccccctcaccctgccttgaggaggcagtggagtcatctgtctgggatcctttctgacccagccctatttgtttgtctctttggcttctttggatttgtatattttagctgttataacactgtaaaacaaacagagtgatttttttgagttgtgtgaatgatgctagctccatagtcaccctgagagtgatgggaacttttgaatttgtggcaagttggagggtagtgtaagtgacctgagattgccaaattggggctagcactggatgtgaggttaggctagtggaaaaatatgcccagaaccagaggagtgtgggctcactgcaggtggttaggctcagatccaaattgtacagatggatagctttggggtaaagaataacatagttgagaagtgcatgtgttagtctgttcatgcactgctataaagaattacctgagactgggtaattatttataaaactcaggtttaattgggtcatggttccacaggctgtacaaaaagtatgatgctggccatcagctcaacttctggggaggccccagaatagttagagtcatggcaaaaagtacaagggaagcaggctcatcttccacggccagagctggagcaagtggtaggagaggtgatacacactttcaaacaagtaggtcttttgagaactccatcaccggacagcacctatgggatggtgctaaattattcatgaaatatccgcctccataatccactcaactgtcaccagcgcagccagccccacctccaacagtggggattacaattccatatgaggtgtgggtggggacacagctccaacctcaatcagtgggcatcctggattgggtctactatagaaggagaaccaggagctgactatgatcttgaaccctacccatgatggccgggcggggtgactcatgcctgtaaccccagcactttgggaggctgaggtgggtggatcgcctgaagtcaggagttagagaccagcctggccaacatggtgaaaacctgtctctactaaaaatacaaaaaattagaccggcgttgtgctggatgcctgtaatcacaccactacgctccagcatgggaaaaaataccaaaacttcgtctcaaaaaaaaaaaaaaaaaaaaaaaaaaaaagactgcccatgaccactgcaccagtgagagggacaccagcatcactgagatgcaagggctggacattcttcataggtcagagctcaaagcaggggacactgatacagagatgggctccatccatagcaccaaagtggtgagaggatgtgggaatggcagaggccagcactttgccatcaatgcaagggggtataaggaggtgacaccagtgccagagtacatcacggggggactgccctacaatatctaggacttacctcttagagcgtgtttcattagcgacaacagatataaatggcagacaggtgtgtccctgcattaacaggaaatagaaatcatcaagaggaacagaaggcagatgtcagcagccccttagaaagtcatcatccttcatacagttaaaatctgagacagttctcacacgagaaggcctaactcaaaaagaggctgggttctcatgaggcaggtttatgcaaaaccaaggaaggtgtacaagtttggaattctccagtttcccttggaaaagacctacagtcatttgcttaggtaactgagcactgaacaaaggtgagtattgttgtcttttagaagctcttggccaagaaggccttgttggcataaaacccatggtttggaaacatcaccatgacccctgttagagtaatggcctaagggtgggggtcaggaaattgatgtattccttgccaacttctgcctctaagtgagtgaactctgtttgtgaacctctctcctctgtggttatgttcctaggctctcatgtataatcaggagtcatagacttagaaacaggaaaaatacttacagtgtttttgtggcctgtgagctatgacttataattttaggaaaaaaacaattgcaaatggaaagcctaagtctatcaatgctcatccaagacaacataatcaataaaaaccaatatcaaatctcaaggcaaattatttcctgtatatagatggcagagatgagcaccaccatcaaaaactcaaggaccagtgctgtgggtccagtcatctgtttcatggaattcaccagtctggtatcttcaaaatccagaaggatgatggcagatggcaggaaagtaatgcaaacgtcatcaggtgtgaccccactgtagcagctgtgatggatgttttctctcaccatagcaataaataacacaacctcggtcacactgtatgcattgttggtctgcaaaatccatgttttgcaaaactcttcaggaaggtggatctgtaatattggcattgacatgagaacaacagcagtatttattcacaatctcaagctctctgtcttcccgtctctctcattagccatccaagtagtcctgaggaaccaagcccatcagaacattctgcaacataatacacagctccattctccattcaaattttgttgttgttgttgttgttgatgagacaacatcttactccatcagccaggctgacgtacagtggggctatctgggctgactgtagtcttgagcttccaggctcaaggcatcctctcacctcagcctcctaagtggcttgaactacagacacacagcgacatgctgggctagtttttgtatattttgtagagacgtgctctcaccatgttattcaggctggactcaaactcctgagcgtaagtgatccaagcaccttggcctcaaagtgctgagattacaagcctgagccactgcacccagcccaatctccattctactgataacaatgtcattaccaggtctgatggacaggaaatggtaaggtttctgaaaacctaaggatcacacagcgagttccaaaggctgaaagtgcatacctgtcgacactgataccaatgacatccaatggtgagaatgacattccttgtagtcctagctctgctcataacaaatctatactgaagtgtaagagtttgatggtcatggggattttccatgtctctgcctttcagcgatgtgccatatctgtgaagtgttcagaaatgcaacagcctgaggcatgctgggcatatcctctaataaaaaggaaaatgccattttatggtcctgtatttctacaagttggaacacatgggcctgtgatccagatgggggaaatgggaatattcccactcattcaccttcatccacgaagcccatttgaaagctttgggcttcccatccttgtagattttagtgttgtgggctgggtgcagtggctttcacctgtactgccaacactttgggaggcctagacaggtgaatccactgaggccaaaagttcgagaccagcctggccaagatggtgaaaccccgtccctactaaaaatacaaaaattagcaaggtattggggccagcacctgtaatcccagctgctcgggaggctgaggctggagaatcgcttgaacccaaaaggcagagactgcagtgacccgatcctgcctttgcactccacctgggcaagcagaacaaaacttctgtcttgaaaaaaaaaacaaaaaacgaacaaaaaagatgttagagttctgggtttagaggtctataccccagaaagagaatggtttcaacaagggacaaagaagttgctttaaacgttgacttgccatttcttttcagtgtgtttgttctcttgcgtcaagagaccaccagaaaagtggtgcaattactctcctgtcaagaatcattgactatcatctgcaagagggtcagatcctggtatataattagggcagaaatacttagtctgagaagggtatgacatccagaggccctattaatgatgtccttttctccatgcctgactctgaccccatgtgctggactgcccctgtgtggatggcctcatggcctgctcggactctgaggtcccaccccaagtggcacctccatggagggctctactcttgtatgggctctgacactcacactgagacactctcccatggacacctcttcacccacttggggtctgaaactgggctactccatccctccctaacctggaacagagagctttcactgctattacacaagtcatagaggctaactcctcatttttccaagctaattattgaaacattagtcctgggttgataagacaagataagttaacttttcataaatttgcttatcaagttttgaataaattcaaataaattcaccttccccacacaccttagttgtcgacatcacacgcgcacccatactcacagggtgagcacgaaggcttcactgtcagtggagaaagtggcaaaacccttctgtgcctcatcctggtctagacctggccctcatcctttcccactcttcccctcactcccttggattcatccacactggcctcctgcctgctgctccacctccctgcgaagctcacccctgcctcagggcctttgcacgtgcagtggcttcaagccatatcctcttcacccagatctcccagatctcctgaatgatcttcttttatcattcaggtctcagcttgcatgtaatcttctcagtgaggattacccaaaccacatagttcattcattcattcaaatattcattcaatggcatattgacaaagcagctacttcatgccaggccttgggccaggtgttatggatatggcaacaaacaaaacaagagttttctgctctcaaatttttacccacttaaaggagatatcatacatcatctgtaaataaatacatcatctgtaaataatgatgtaaataaatacatcatctgtaaatctgtaaataatgatgtaaataaatacatcatctgtaaataaataaagtataataaaagaaaatagtaggtttttttggttggaggtgaccgtgaagtttgcaaataccatcttacaacacattattttattttatttcatttcatttttaattttattattattatactttaagttttagggtacatgtgcacaacgtgcagatttgttacatatgtatacatgtgtgaagttggtgtgctgcacccattaactcgtcatttagcattaggtatatctcctaatgctatccttcccccctcccccaccccacaacagtccccggtgtgtgatgttccccttcctgtgtccatgtgttctcattgttcagttcccccctatgagtgagaacatgcggtatttggttttttgtccttgtgatagtttgctgagaatgatggtttccagcttcatccatgtccctacaaaggacacgaactcatcattttttatggctgcatagtattccatggtgtatatgtgccacattttcttcatccagtctatcattgttggatatttgggttggttccaagtctttgctattgtgaagagtgccgcaataaacatacgtgtgcgtgtgtctttatagcagcatgatttataatcctttgggtatatacccagtaatgggatggctgggtcaaatggtatttctagctctagatcactgaggaatcgccacactgacttccacagtggttgaactagtttacagtcccaccaacagtgtaaaagtgttcctatttctccacatcctctccagcacctgttgtttcctgactttttaatgatcgccattctaactggtgtgagatggtatctcactgtggctttgatttgcatttctctgatggccagtgatgatgagcatttcttcatgtgttttttggctgcataaatgtcttcttttgagaaatgtctgttcatatccttcacccactttttgatggggttgtttgtttttttcttgtaaatttgtttgagttcattgtagattctggatattagccctttgtcagatgagtaggttgtgaaaattttctcccattctgcaggttacctgttcactctgatggtagtttcttttgctgtgcagaagctctttagtttaattagatcccatttgtcaattttggcttttgttgccattgcttttggtgttttagacatgaagtccttgcccgtgcctatgacctgaatggaaatgcctgggttttcttctagggtttttatggtttgaggtctaacatgtaagtctttaatccatcttgaattaatttttgtataaggtgtaaggaagggatccagtttcacctttctacatatggctagcctgttttcccagaaccatttattaaatagggaatcctttccccacttcttgtttttgtcaggtgtgtcaaagatcagatagttgtagatatgtgacattatttctgaggactctgttctgttgcattggtctatatctctgttttggtaccagtaccatgctgttttggttactgtagccttgtagtatagtttgaagtcaggtagcatgatgcctccagctttgctcttttggcttaggattgactttgcaatgcggggtcttttttggttccatgtgaactttaaagtagttttttccaattctgtgaagaaagtcattggtagcttgatggggatggcattgaatctataaattaccttgggcagtatggccattttcacgatattgattcttcctacccatgagcatggaatgttcttccatttgtttgtatcctcttttatttcattgagcagtggttttagttctccttgaagaggtccttcacatcccttgtaagttgggttcctaggtattttattccctttgaagcaattgtgaatgggagttcactcatgatttggctctctgtttgtctgttattggtgtataagaatgcttgtgatttttgtacattgattttgtatcctgagactttgctgaagttgcttatcagcttaaggagattttgggctgagacaatgggttttctagatatacaatcatgtcgtctgcaaacagggacaatttgacttcctcttttcctaattgaataccctttatttccttctcctgcctaattgccctggccagaacttccaacactatgttgaataggagtggtgagagagggcatccctgtcttgtgccagttttcaaagggaatgcttccagtttttgcccattcagtatgatattggctgtgggtttgtcatagatagctcttattattttgagatatgtcccatcaatacctaattattgagagttttcagcatgaagggttgttgaattttgtcaaaggccttttctgcatctattgagataatcatgtggtttttgtctttgggtctgtttatatgctggattacatttattgatttgcatatattgaaccagccttgcatcccagggatgaagcccacttgatcatggtggataagctttttgatgtgctgctggattcggtttgccagtattttactgaggacttttgcatcaatgttcatcaaggatattggtctaaaattctcttttttggttgtgtctctgcctggctttggtatcaggatgatgctggcctcataaaatgagttagggaggattccctctttttctattgattggaatagtttcaggaggaatggtaccagttcctccttgtacctctggtagaattgggctgtgaatccatctggtcctggactgtttttggttggtaagctattgattattgccacaatttcagatcctgttattgctctattcagagattcaacttcttcctggtttagtcttgggaaggtgtatgtgtccaggaatttatccatttcttctagattttctagtttatttgcgtagaggtgtttgtagtattctctgatggtagtttgtatttctgtgggatcagtggtgatatcacctttatcattttttattgcatctatttgattcttctctctttttttctttattagtcttgctaccggtctatcaattttgttgatccttttaaaaaaccagctcctggattcattaattttttgaagggttttttgtgtctctatttccttcagttctgctctgattttagttatttcttgccttctgctagcttttgaatgtgtttgctcttgcttttctagttcttttaattgtgatgttagggtgtcaattttggatctttcctgctttctcttgtgggcatttagtgttataaatttccctctacacactgctttgaatgtgtcccagagattgtggtatgttgtgtcttttttctcgttggtttcaaagaacatctttatttctgccttcattttgttatgtacccagtagtcattcaggagcaggttgttcagtttccatgtagttgagcggttttgagtgagtttcttaatcctgagttctagtttgattgcactgtggtctgagagacagtttgttataatttctgttcttttacatttgctgaggagagctttacttccaagtatgtggtcaattttggaataggtgtggtgtgatgctgaaaaaaatgtatattctgttgatttggggtggagagttctgtagatgtctattaggtccgcttggtgcagagctgagttcaaatcctgggtatccttgttaactttctgtctcattgatctgtctaatgttgacagtggggtgttaaagtctcccattattattgtgtgggagtctaagtctctttgtaggtcactcaggacttgctttatgaatctgggtgctcctgtattgggtgcatatatatttaggatagttagctcttcttgttgaattgatccctttaccattatgtaatggccttttttgtctcttacgatatttgttggtttaaagcctgttttatcagagactaggattgcaacacctgcctttttttgttttccattttcttggtagatcttcctccatccctttattttgagcttatgtgtgtctctgcacgtgagatgggtttcctgaatacagcacactgatgggtcttgactctttatccaatttgccagtctgtgtcttttaattggagcatttagcccatttacatttaaggttaatattgttatgtgtgaatttgatcctgtcgttatgatgttagctggttattttgctcattggttgatgcggtttcttcctagccttgatggtctttacaatttggcatgtttttgcagtggctggtactgactgttcctttccatgtttagcgcttccttcaggagctcttttagggcaggtctggtggtgacaaaatccctcagcatttgcttgtctgtaaaggattttatttctccttcacttatgaagcttagtttggctggatatgaaattctgggttgaaaattcttttctttaagaatgttgaatattggcccccactgtcttctggcttctagagtttctgccaagagatcagccgttagtctgatgggcttccctttgtgggtaacccgacctttctctctggctgcccttaacattttttccttcatttcaactttggtgaatctgacaattatgtgtcttggagttgctcttcttgaggagtatctttgtggcattctctgtatttcctgaatttgaatgttggcctgccttgctaggttgcagaagttctcctgggtaatatcctgaagagtgttttccagcttggttccattctccccatcactttcaggtacactaatcaaacgtagatttaatcttttcacatagttccatatttcttggaggctttgtttgtttctttttactctctttcctctaaacttctcttctcacttcatttcattaatttgatcttcattcacttatatactttcttccacttcatcaaatcggctactgaaggtattgcatgcatcatgtagttctcatgccatggttttcagctctatcaggtcatttaaggtcttctgtacattgttttctctacttagccattcgtctaatcttttttcaaggtttttagcttccttgtgatgggtttgaacatcccctttagctcagagatgtttgttattactgaccttctgaagcctgcttctgtcaacttgtcaaagtcattctccatccagctttgttccattgctggtgaggagctgcgatcctttggaggagaagaggtgctctggtttatagaattttcagcttttctgctctggtttctccccatctttgtggttttatctacctttggtctttgataatggtgacctagagatggggttttggtgtggatgtcctttttgttgatgttgatgctgttcctttctgtttgttagttttccttcgaacagtcaggttcctcagctgcaggtctgttggagtttgccggaggtccactccagaccctgtttgcctgggtatcaccagcggaggctgcagaatagcaaatattgcacaacagcaaatattgctgcctgatccttcctctggaagcttcgtctcaaaggggtgcctggctgtatgaggtgtcagttggcccctactgggaggtgtctcccagttaggctagatgggggttagggacccacttgagaaggcagcctgtccattcacagagctcaaacactatgctaggagagccactgctctcttcagtgctgtcagatggggatgtttaagtctgcagaaatttctgctgccttttattcagctatgccctgcccctacagatggagtctacagaggcaggcaggcctcattgagctgcggtgggctcctcccagttcgagcttccagaccactttgtttacctactgaagcctcagaaatggtgaacacccctcccccacccagtctgccgccttgcagttccatctcagactgctgtgctagcagtgagcgaggctccatgggcgtgggacccactgagccaggcacaggatataatctcctggtgtgccatttgctaagaccattggaaaagcacagtattaaggtgggagtgtcccaattttcccagtacagtctgtcacgggttccctcatctaggaaaggtaaatcccctaaccccttgtgcttcccggtgacgcaatgccccaccctgcttcagctagccctccatgggctgcatccactgtccaaccagcccaatgagatgaacaaggtacctcagttggaaatgcagaaatcacccatcttctgtgtggatcaggctgggagctgcagaccggagttgctcctattcggccatcttggaatggcaatctatgtttgctttttacatttgaaaaaactggtgtcacgtacctaggtattaatcattgtggtatcctcttgccgatttacctctttatcattaactagtgaccctccttgtcttttgttgttacagtctgtgattttagtctattttatctaatatgagaatagctactctggcacttttttggtttccagcttcatgaaatatccttttccatttccctgttttcatttccctttcggtgtctctatagatgaagttgatttctttaaggcaccataagttgggtcttatttctttatccatttgaccatttagagaatttagaacactgtcagtgttattattcataagtaaaaacttaagagtgggtgtagtggtgtacatctgtatttcctgcactttgagagactgaggcgagctgatctcctggggtcaggagtttgagaccggcctggtcaacatgatgaaaccctgtctctactaaaaatacaaaaattagccaagcatgctggcatgtgcctgtaatccaatttacttgggaggctgaggcaggagaagcttgaacctgggagacaaatgttgcagtgagctgagatcacacagagaagtcatctccactctcctcatcagaacctcttgttcacagcatttgtgagcacaaatcaatgatggttattctttcctactaattagggatattttattacacagcaatagcctccagcaaagggaaccatcatacatgattcctacaagttgacagggctggaattatcactgaaaaactaaggtggctatacttgattcccaatgtccaatttttcatgaatagagaaatttatcctttttccccccagccagaaaccaagttttgctcttacgcccaggctggaatcaagtggcacaatctcagctcactgcaacctctgccccccagcttcaagaaattcaccttttgaacaaggagatattaaggatacactatgtgtatgctaccggtggttgcaggagactcagaaaagagagaaacagtcactggcctcgtgcaactgatattctcgggaggagagaaaggcaatcaagaaagaaacatgctgtatttcagacagctgtaagtcctccacaagaaaagaaagcaggtgaggaacataggaaatgtgtcaaccataaggttcccgctaattctataagttggtcagggatatcctccaagaataagcagcatctgagcaatcacctgaagggaggaaggaaggaagactgtgagtggtggcttacacctgtaatcccagcactttgggaggccaaggagggcagattgcctgagctcaggagttcacgaccactcagagcaacctgttgatacccaatctctactaaaaacacacaaaaaaattacccgggtgtggtggcacgcacctgtagtcccagcttccatgcccagctgatttctctctctccatatatatatatatatacacatatattgtttttgcagagatagggtctcactgtgtcacccagtcatcaagcaattctcttatactgttttggaaaagcatgggaattacaggtgtgaaataccctgctggtcctgaaaaatgtgatatttgggattctctgcctggcttgttttacccaaaataatgacctccagttccttccaggttgctgcaaaagacatgattttcactgttttataactgaatagtattcctgtatgtatacataccacattttctttatttattcttctgttgattgacatgtagggtgattccatgtctttgctactgtaaataatgctgcagcaaatatttgtgtgcattttgatctattcctttgagtaggtacccagtactgcaactgcaggactgagtagttgttatattttttgttctttcagaaatctccatagtgtttgccataaaatctgcactaatttacattcccaacaacaatgcataagatttccccttttctccacattctcactaacatttgttatgtttttgtctttttcataatacccattctgactggagtaagatatctcattgtggtggttgttgatatttttgagacggggtctcactctgttgccagactggagtgcagtggtgtgatcgtggcttgctgcaacctccacctcccgggttcaagcaattctcctgcctcagcctcccgagtagctgggactacaggcgcgtgccaacaggcctggctcattttttgtatttttagtaaagacagggtttcaccatgttggccaggatgatcacagtctcttgagctcatcatacacctgcctcagcctcccaaagtgttggaattacagtcatgaggcagcgcacccaacctcaatgtggttttaatgaccatttctctgacgattcatggtgtggagaatttctttgaaataccttttggccatttatatgtgctcttttaaaaactgactcctgtccaggtgcggttgagcatgcctgtaaccccagaacttcgggaggctgaggccaatggatcacttgaggcaaagaggcagaaatcagcctggccaacaaggcaaaaccccatctttactaaaaatacaaaaaatcagccacgggctgtgactcgtgcctgtggtgcaagttactcaggaggttaaggcacaggaattgcttgaacccggtaggcacaggtcacagtgagccaagatcatggcactgcactacagcatgggtaatagagaaagacctgtctcataaaaacaaatgaataaataaataagataaaaaataaaaaagtctctttatgtcctttgccgactttttaatgggattctttggagttttctgttgtagttgagatctttgtttactctcggtattagtcttttgtcaaaggaaaagtttacaaataatttcttccgttctgcagtttgtctgctcactctgttgagaggattatttctttggctgtgcagcagctttttgtttcagtaaagcttttgaatttatataattaaaattttcagtttggtttaaatttgcactggtcgatttttggttttgttgcctgtacttttgaagtcatactcttgaactctttactagacaataaccagaagagttttctctagttttcttctcacatttttattatttcagtacatatatttaagtctataattcatcttcaattgatttttgtagaaatagtgagaaataggagtccaggtttattcttctgcaaatgacaattcaattgttccagcaccaattattgaaaagggtgtgctttcctcaacgtatattcttatcagctttgtcaaagatcagttggctataaatgtgtggctttctttctgggctctctagtctgttacatcaatctgtgtgtctatctgtatactactaccatgctgtattggtgatgatggctttgtaatataatttgaagtcaagaaatgtgatgctcccagctttgtttatttgcttcagaaaggctgagtcaacagctgcagagatgaagctgcccctcctcgcagggctccttcccggaaaaagatcatggctcccactgaccatataaccatggctggaactcctgaaattcccaaagggaggccctacccagtgaggggggatgaatgaaggtcctacttaaggaatctgtctggccacaatcaggcacagcagctgtgctgccttgtgggggaccagaccacctggattccctggagcctgcaggctagaatgtctgagtccatggaaacacagaaatggaggccgccctcacctccccagaaaactgtagtctcaggcagtctccagccgattgccactggttggctgctattccaagccagtgggtcttaacttgagaggtgctgtggaagtggggcccacggaatgaggctgcttggctccctggattcagccccttttctaagggaatgtacagatggaactcccgccttgcccagctttccaagtatataaaactcctgagtctctgtgagtgtctgagcgagtgctctggcaacattcgacacggctctgtgtatctgacccaagacccttatggcatgagctaatgggaggatcttctgatccatgcgtggcaaagatgcatgggagaaacatggtttgtgggtaggggttgtgcattcactactgcttctcttggctgtaggtgaaggtttctttggctctgtgctgatactgggtgcaccatcacccaccccctttgtttcttctcctgggtcaagtcatttgcctaatcagtcccaatgtaggaacctggatacttcagttcaaggtgctgaattcaccgtgcttttcattcaggggaagacagctgcttctcattgggcatcttggcctgcccacttcacgtcactttttgtaaaatccacaccactccaggaatatccattacttaacttcgcctgaaataaacagaaggctcattacacttatcatgggctcacttacttcgcctataatgaaggtgccatggaaatgctagtggatgacgtggtccattttcttagggatgagatagaaaaatggtgtatggctttttaatttaattaaaatttttagtttggtttaaatttacattggtctctttttggttttgttgcctgtacttttgaagtcttactcgtgaactctttactggacaatgaccagaagagttttccctaagtttcttctgatattttgaccatttcagtacatacatttcagtctataattcactttaaattgatttttgtaaacatggtaagaaataggagttcagatttattcttccgcatatgataatgcaactgtcccagtaccaattattgaaaagggtgtgctttccctagtgtatattcttgtcagctttgtcaaagatcagttgcctatgaatgtgtggctttcattttggattctctcgtctgttacatcaatctgtgtgtccacatttatacctgtaccatgctgtattggtgactatggctgtgtaatatattttagagttaggaaatgtgatgctcccagctttgttcatttgcttcagctgaaaaggttgagtccacaattacaaagatggcagccgcccatccccggaggacctccaacccagaaagagatcaggcttcccaccaaccctataaccctggctggagttcctgaaattccaacagggaggaccttcccagtgaggagggatgaatcaaggtcaaatttaaagaaacagtctggccactatcaggcacagcagcagtgctgccttgtgggggacccctcctgctccagaccagctgccctccctggagcccgaaggctagattgtctgagtctacggaaacagagacggtggccgccccaaccacccagaactcggtagtctcaggcacttggcttgctatcttgccactgcttggctggtattccaagcccgtgggacttgagaagtgctgtgatgatggggaccacaggatgaggctgtctggctccctgtgatatggctgtgatgagtggaggaacaccagggctcatgtctcacacagaattggagaaaatgacacaaacacatgtacagtggttttatggcgtgcagtttaataggcaagaacgaaggaagagctccccatactgagacagagggaggggggctccaaagccaaaagaggaaacccggagtgctgtggataccaatgagttatatgaagaaactggagggggcggtgtctgatttgcatagggttcaggcgattggttcgaccaggcatgtcatttatgtggcccacggaaaaactggccctcccacctagcctttgaatatgcacgtgccggacaccctgatttcctacactcatggggatatatgggggtggccatatcgccaggcacaggtggggacaagggccagaagagggcgggaatcgctatgtttgggtggacccagtttctaatggccggcatctgcagatcaaggttaccggagaactctaaaagccggggctttcctgctagacaagactcatttctggagctgctttaaaaagaaacaaaacttcccaaggaccccttttcctccctgtctgcccaaaataatttcttaacaactcgtataacacctgaattcagcccccttactgggggaatgtaccaacggaactcccacctttcctggtttctcaaggctagattgtgtaaacctcctgggtctcggtctgtgtctgagcagctgctctgccaacactccacacagccctgtgtactaggcccaaggccgccgtgactcagcccatgggaggatctcctgatttcttggttgcaaagatccatgggagaaaaatggtttctggggcggggtcacacactcatggcttctcttggctgtgcaagaaggttcctttggctctgttccaatatagcgtggttcatcacccacccctgttttctttgttctcctgagtcaagttgtttgcctagtcagtcccaatgtgagaacctgaatatttcagttcacgtgcttatcgtgaaattcactgagactttaattcagtggaaggcagcctcttctaattggccatcttggcccgccccctccacgtcacctcccataaaatggccacgctctccagggacgatgccattatatatctttacgtgaaaccgacagaacacttattacactttttgtgagctcatttacttcacttataatgaacatggccatggaaatgctagtggagaaagtggtcgattttctgatggatgtgataaaaaaatggtttgccgaccaattaatgacatatgtctcaaaactagtaacgagacccttaatcgctgggttgaagtttctaatcaagaagatgctcatctatgtattcaacaaagcagcttcccttgcttctgaaatgcttccaaacaacatctcatatttcctgaagaagataatgcctggacaagcagcacaagtcattcaggtttactttcagctcataaatccagcaggatattcgcacaattgttgggaaaccttatcagttcatgagtcgtgcatgtttcctttaatttcaggaggaagagggtaatctggaagagtttcctgacctactctgctgctgtgattaaacaaccaccaggaaattttgatgacactgttctcctgagctcctccctttcctcggggaagaaaagcattgaaactacaaaaataaagtgttatttggctggagtgaggtctcatgtctgcttatgcggtggctcgctgctcagaacagggtgagtctctgagttgtacgctgaggaggggaggctgtcaatctagaaaaaacccattgcatgggacacctccatggggtctggggggctgaggatgaggagctggactggatctagggaaggaggaggtttcagagggtgaaattctggcagtaaatcctgggggtgtttgaaaacttcctccctcagaaggagaagactcagggaggaataaggacaaaccatgggtcccttgaggggcatttactaacttaagaggactttatcgggaagcagagtgacaatggcctccttgaggactgaggcccctggataaatgaggcccagatccagatccagtccatgggagatgagaccttcaagggacatatttttgttgggacagaggaaaagtgcagctctgcagctgcagaggaagccttggcagtgtgaaagcgaccttggagggggccctgtgcgttctgaatgcttctgaggtccatcccctgtccccgcctctttttctggattttttgggctccatggtctccgccatcttctgagcgctccacgctgccaccttcagttttctcttctgggctccaaatactccaaaatctttcatatctgtgcccctacccctgtttttagcatgtgttgggactccaggtccctgaaggtttctggcctgaaatccacctccccagcggtgtggattctgctctagagaccccgcacttggcaaggttcccaggcccctgggggacaaccgagtggtatgtgcacttcagggctccacactcggcaaggtctttcaagcccttggggttccctcctcagttttcttcacatgtctgggatgtagtcactctataaatgccgggatgtgatccccaccccagtgattttttttagttccatgagtgttgctatctgaatagtcatcctgagagtgatgggaccttttgaatttgcagcaagttttagattagtgtgagtggcctgagatcgcaaaactggggctagcattggatgtgaggttaggctggtggaaaaatttgcccagaacctgaggagtgtgggctcactgcaggtggttaggatcagcacagaattgcaaggatgtatagctttggggtaaagaataacatggttcagaagtacatgtattagtcttttcatgcattgctataaagaattacctgagactgggtaattaattataaaaactcaggtttaattggctcatggttccacaggctgtacaaaaaggatgatgctggccatcagctcaacttctggggaggcgtcagaaaacttagagtcatggcaaaaagcacaagggaatcaggctcatcctccatggccagagctggagctagtggtaggagaggtgctgcacacttttgaacaatcagatctttttagaactctatcaccagacagcacctagaggatggtgctaaattattcatgaaatatccacccatatgatccactcaattctcaccggcccaaccaggaccacctccaccattggggattacaattacacatgagatgtgggtggggacacagatccaaactcgatcagtgggcatcttggactgggtctactatagaagaagaaccaggagctgactatcatccttaagactgcccatgatggccaggcagggtggctcatgcctgtaatcccagcactttgggaagccaaggtgggtgaatcccctgaggtcaggagtttgagaccagcctcgccaacatggtgaaaccctgcctctactaaaaacacaaaaaattagatgggtgttgtgccagacgcctgtaatcacagctactccagaggctgaggcatgagaattgcttgaacctgggaggcggaggtggcggtgagccccaatcgcactgctacactccagcatgggcaacaataccaaaacatcgtctcaaaaaaaaaaaaaaaaaaaaaaaaggctgcccatgaccactgccccagtgagagggacaccagcatggctaagatcaagtgctggacattcttcatgggtcagacattaaagcaggccacactgttacagagatgggctccattcatagcaacaaagtggtgagaagatgtgggaatggcagaggccagcactttgccatcaatgcaaggtgggcataaggagctggcaccagtgccagagtgcatcaggggaggactgctttgcaatatctagcacttacctcttagagtatgtttcattagggacaacagatataaatggcagacaagtgagtcccttcagtaacaggaaatagaaatcatcaagaggaacagaaacagatgtcagcagccctcatataaagtcatcatccttcatccagttaaaacctgagacagttctcacataagaaggtctaattcaaaaagagactgggttctcatgaggcaggttcatgcaaaaccaagggaagtatacaactttgggattctccagcttcccttggaaaagacctacaatcatttgcttaggtaactgagcactgaacaaaggtgagtattgttatctttcagaagctgttggccatgaaggtcttgctggcataaaacccatggttggaaacatcaccatgacccctgttagagtaatggcctaagggcaagggtcaggaaattgatgtattccttgccaacttctgcgagacgagtgttggtccactcatctctttcacggaattcaccagtctggtatcttcaaaatccagaaggatgatggcagatggcaggaaactaatgcaaacaccatcagttgtacctccactgtagcagcagtaatggatgttatctcttcattgtaatatccagggagggagaagatgacattattctcaatattctaaacaccctgtgtgtacagcctctgtgatattttttgtaatatccgtgtgggagagaattatattactcctaatatctcaggggttgtgccccctctgtgacaatgttcctaacacccaggaggggataggatgatatcacttttagcatcacagggggtgtacaccccactgtaatattgttcataatatccgggggggagagaatgatattactcccaatatcgcaaagactgtacaccaacctgtgatattatttgtaatatccataagaggaagaataatattactcccaatgtcacaggaagtgtacacccttctgtgatattgttcaaaagatccagttagggaggggatgatattactctcaatatcttaaacaccctgtaggtaagccctctgtgatattcctcataatatccagagggagaggatgatattactcccaatattgcatgaagtctacaccccacctgtgatattgttcctaatatccaggatgggagaggatgatattactcccaatgtcgcaggggatgtacaccttccctgtaatattgttcgtaatatctagaaaaggagaggataatattactttcaacatcgcagggggtgtacaccttccttgttatattgttgctaatatccagggaaaaagaagatgacattaccaccactattgcagaaggtgtacacccccccttgatatagttcctaatatccagaaaaggagaggagatattactccaaatattgcaagaggtgtacattcccctgtaatatttttcctaacattcaggaagaaagagagtgatattgcccttaatattgaagggagtgtgccccccccgtgatattgtttctaatatccaagaaatgaaaggatgatattactcccaatatcacaggggctgtacagccccctcccatgatattgttcccaacatcggggggggggtgaaatagtattattcccagtatcacaataggtgtacacacctgtcgtgatattgttcctaatacccatgggggaaaggacgatattattcttaatatctcagagggatgtacaccctccctgtgatattgttcctaatatccggggtgggagaggatgatattacccccaaaatctcaaagggtgtacacccctcttgtgatattgttcctaatatccagggtggagaggataatattattcccaatatccaggaaaggaaacgatgatgttactgtgaatattccagggggtgtcctcccctctgtgatattgttcctaatatccaggttggggagattatgatatttctccaaatatcacaaggggtgtacaccaaccctgtgttattgttcctaatatcgatggggggagaggacgatattactcccaatatcacagggggtgtacaccacctttatgatattgttcctaatatccatgaagaaagaggatgatattactttcaatatcgcaggggatgtacactccccctgtgatattgttagtaatacctaggagaagaaagtgtgatattactcccaatatcgcaggggatgtacacgcttcctgtgatattgttcctaatatttagggggaaaggggatgatattactcccaatatcgaatggtgtgtacacccccccgtgattctttttttttttttttttttttttttgagatggagtcttgctctgccgcccagactggcgtgcaatggcgcaatctcggctcactgcaacatttgcctcccaggttcgcacgattctcctgcctcagccttcggagtagctgggattataggcagctgtcaccataccaggctaatttttgtatttttagtagagttggggtttcaccatgttggtcaggctggtcttgaattcctgacctcaaataatccacccaccttggcctcccaaagtcctgggattacaggcataactttccctgtgatattcttcctaatattcaggaagaaagaggatgatattgctcccaatatcgcagagagtgtgcactcctcctgtgatatggttcttaatattcagaggaggagaggatgatattactttctatattgcagaaggtgtacacctccctcgtgatgtctttcctaatatccagtgggggagaggttattagtctcaaaatcacagaaggtgtaaacccccatttgatattgttcctaatattcaggggtggggagagaaaggtattactcctagtatttcagggcatgaacacccccaccgtgatatcattcctaatatccagaaggggaggcaatgatatttctcctaatatcacaaagggtgtacaccccttctgtgatattgtaaatattctgtgtgtacacccccctgtgttatagtctgtaatatccgggtgggggagagggtgatatttctccccatattgtaggggatgtacacccttctgtgatatggttcgttatatccagggaagaaaaaggtaatattgctgcccatattgtggagagtgtacacccccatgtaatatggttcgtaatatccaggagtggagagggtgatactgctccttacatcgaggaaggtgtacaccttattgttatatgattcgcaatatccaggggaggagagagtgatattgctccccatgtcgcagggggtgtaaaccctccgtgatatgattggtaatatccaggaaaggaaagggtgatatttctccccatatcgcgggggacgtacatcctcctgtgatatggttcgtaatatccaggaggaaagaggaaaatattgctcttcataacccgaggggtgtacaacccctgtgatatggttcgtaatacccagaagtgtacacccctctgtgatatggtttgtaatatccagggggttagagggtgatattgctccccatatcgcagtgggggtacacccccctggattggttcataatattcatggggggagaaatttacatttatcctcatatcagggggggtgtacaccccccgtgatatggttcgtaatatccaggggaagaaagggtgatattgctccttatatcgcggaaggatcaccctcccctgtgatatggttcataatacccagacgggaagagggtgatattgttcttcataaagcgaagggtgtacagccccctgtgatatggttcataatatgcaaaaggggagagggtgatattgctccccatatcacggagggtgtactcccttctttgatatggttcgtaatatccaggggtgtagatggtgatatagctcgccctattggggagggtgttcacccctctgtgatattgttcgtaatgtccagggaaagagaggatgatattactcccaatatcgcagaaggtttacaccactctgtgatattgttcataatatccagggaaggagaagacgatattactcccaatatggcagggggtgtagaactcctgtgatattgtttgtaatatccaggcaaggagaggatattactctcaatatcgcagaaggtttacacccctatgtgatactgttcatgatatccagggaaaaagaggatattactccctatatcacaaagggtgtacacccctttgtgatattttttgtaatatccaggggagagaggataatattactctcaatatcagaaggggtgaaaaccctcctgtgtcattgttcataatatttagggaaggagagagtgatattactccaaatatcacagtgggtgtacacccccctatgatattgttcctaatttccagaaggggagatatgatattattgccaatatcgcagaaggtgtacaccttactctgacattgtttgtaatatccagatggggaaatgatgatattactcctaatatcacagggggtgtacacccccttgttttattgtttgtaatattcaggggaagagacgattatattactcccaatatcgcagggtgtgtacaacactctatgatattgttcataatatccaggggaggagaggaagtgtacacccccccgtgatattgttcgtaatatccagaggtagagaggatgatattactcccaatattgcaggtggtgtacacctttctgtgatattgtcatgatattaagaaggggagaggatgatattactaacaatatcacaaaaactgtacactccctgtgatattgttcataatatccagaagaagggaggatgatattattctgaatctcgcagaagatatacaccaccctgtgatatggttcataatatcctaggggaaagaggatgacataactgtcaatatcgcagggggtgtacaattccctgtgatattgttcacaatattcagagggaaaaaggataatattactttcaatatcgcaggcggtgtacacattactgtgttattgtttataatatccggaatgagagaaaattttctcccaatatcacaggaggtgtacactcccctgtgatattgttcgtaatatccagggaggggagaggatactattactcccaacatctcagggagtgtaggccccccctttgatattgttcctaatattcggaagtggagaagatgatattacttccaaaatcgcagggggtgtacactccctctgtaatattgtttctaatattcatgagtggaaagaaagatattactcccagtattgcaggggacatacaccacactgtgatcttgttcacaatattcgggggggagaggatgatattactcccaatatcaaagtaggtgtacacccccttctgatattgatcgtaatatccagaattaaagatgataacgttactcccaatattgcagggggtgtacatttttgaatactgttcataatattaagagggggaggggatgatatctgtcccaatatcgcaaagtgtgtacacctcctgtgacattgtcccaaatatccagaggaaaaaaggatgttattactcttaatatctcagagagtgtacacctccctgtgatattgtttgtaacatccagaagaaagaggctgatattactcttaatatcgcagggggtgtacacccccgccccgggatattattcgtaatatccagggggaagtggaatgttcagaatgggagaggatgatattacttgcaatatcatagtgggtgtacaccccactgtgatattgtttgtaatatccgggaaaggagaaaatgacattcctccccatatggcaggggctgtacaccacctatcatattgttcaaaatatccagaaggggagaggatatgtctccaagtatcacagggggtgtacaccccgctgtaatattcttcctaatatccagggtgtgagaggataatagtactcccaatatcccagggcatgtacaccccccttgtgatgttgttcctaaaattcatggggagaaagaatattactcccaatatcacagggggtgtacatacactctgtaatattgttgccaatatgcagcaggagagaggatgatattactcccaatatcacaggggctgtacaccccgctgggatattgtttctaatatcaagggggaaaaaggatgatattactcccaatgtcgcagggtgtgtacttcctctttgtgacattgttcctaatatccaggagagaagagggtgacattccttccaaaactgaaaggggtgtacacaccctttgagatattgtctttaatatccagaacgaaacaggatgatataactcctaatactgcaggggggtacaccctctctgtgatactgtttctaatatccaggaggggaaagaaaaatattaatcccaatatcacagggggtgtacattccccctttaatattgttcctaatatccaggaagacacaggatgatactatttccagcagcacagggcatgtacacccctttgtgatattgttcctaatatccaggaaaagagaggatgatattactgtcaatattgcagggcgtatacactggttctgtgatattgtttctaatatccgggggtggagaaaatgatattactcccaatattccagcgggtgtacacccgttctatgatattgttcctaatatctgggggagagagaatgatattattgtcaatatcacaggggatgtacagattccctgtgatattgtttctaatattcacagggggagaagggtataatactcccgatatcgcagggggtgtacactccccctgtgaagttgttcctaatatccagggattgagagaatgatattactcccaatatcacaggcggtgtaaaccccctgtgtgatattgttcctaacatccagaggaaaagatgatgatattattttcaatatcacagggggtgtacgcatccctgtgatattgtttctaatatccaggggaggagaggatgatattattgttaatatcgcagggggtgtaccccaccctgtgatactgttcctaatatccggggtggaagaggataatattgctcccaatatcgcaaagggtgtacaaccttcctgagatattggtcctaatatccagggagggagaggatgatattactttcaatatcacagggagtttacacaacccctgcgatattgttcctaatatccagcggaagaagagttaggataatactattttcaaaattgctgggtctgtaccccctccccgtgatattgtttctaatatccaggaggggagaaagtaatatgactcccaatatcttagaagatgtacaccctccccataatattatttcttacatccagggggtagaggatgattttgctttcaatatcacagagggagtaaacctttccggtgatattgtttttaatatttaaaaagagagaagataaaattactcccaatacaaaggggatgtattgtgtactcccccctctgatattcttttttaatatccagatggagagaggatgatattactttcaatattgcatgggatgtataaatcccctgtgttattgttctgaatatacaggtggggagagtatgatattactccaaatatcgcagggggttctttccccctgtgatattgttcctaacattcagggagggagaggatgatattactcttaatattgcagggggtgtacccacgcctatgatattgttcctaatatccagagggggagaggatgatctaactcagaatatgacaaggggtgtacacacagcctgtgatatggttcctaatatacaggggagaaggggataatatttctcccaatatcgcagggggtgtacaaccccctgtgatactgttcctaatatacagaaggggacagcatgatattgttcctaatatcgcaggaggtgtacaacgccctgtgatattgttcctaatatccagggcgggagaggatgatattaccctcaatatcgcagggggtgtgcactttccctgttatattgttcctatgatccgggtggggggaaatgacattagtcccaatatcgcaggatgtgtgcaccgctcccccgtgatattgttcctaatatcaagggggagagaggaggatattactcccaatatcgcaagggatgtacatcctccatgcgatattgttcgtaatattcaggaggagagaggatgatattactcttaatatcgcagaaagtggacacccaccctgtgatgttcttcataatatccagggaagcagacgattatatgactttcaatatcgctgggagtgtacatcccttttgggatattgtttctaatatccaggaagggagaggattatattactctcagtattgcaggcagtgtacaccttttttgtgatattgttcctaatattcagaaagggaaaggatgatattactcccaatattgcaggtggtgtatatccccctctgatattgttccttatatcaaggaagagaaagaataatattactcccaatatcaaagacagtgtagacccctcctgtgatattgtatttaatatccatggggaaagaggatgatgttactcccaatatcgcagggggtttacacccacactgtgatattattcctaaaatccagtggaggagaaaataatattgctcccaatattgcagggtgtatacaggccctcccccgttatattgctcctaatatccagcggtggagaggatattactttcaatttgtgtagggagtgtatacccccctgtgatatttttctaatatcaaggatgggaaaggatgacattactcccaatatcgcaggaggtgtacacgccctgtgatattgttcctaatatctagggaaggagaggatgatattactttcaatattgcaggagctgtacaccctctgtggtattgttcttaatatttaggttgggagaaaatgatatgagtccaaatatcgcagaaggcatacacacttccaataacattgttcttaatatccgggggagagggtgatattactcccaaaatctctggggggtgtacacccccttctgatatttttcctaatatccagggaaggaaacgatgatattactataaatattccaaggagtgtacaccttcctaatatcctaatattgttcctaatatccaggggtgggagaggattatattactcccgatatcgcagtgggtgtacacccctcctgtgatattgtttctaatatccaagctaggagaaaatgatatcactctcaataccacagggggtgtacaccttccgcatcatattgttcctaatattcagagggaaagaagatgaagttactttcaatatcggaggggttgtacacaacccctgtgatattgctgctagtatccaggaagaaaggggattatgttactccccttatagcagggggtatacacctcccctgtaatattgttcctaatatcaaggctgggatatacgtggggggaaggatgatattactcccaatatcgcaggggttatacaaccttctgtgatattgctcctagtaaccagggcagaagaagatgatattactcctaatatcgcaggaggtgtacactcccccattatgttgttcccaatatgcagaaaaggagaggatgacattattgccagtatcgcagggtgtgtacaccacccctgtaatattgttccaaatatttagggggagagaggatgatattactcccaacatcgcagggggtgtacacacatcccctgtaatatagttcttaaaatctaggggaaaaggggatcttatttctctaaatattgcagagggtgtacactccccggtgatattgttcctaatagccgggagggagataattaaattactttcaatatctcagagagtgtacatcgcccttgcgatattgttcctaatatccagagcaaaagagaatgatattactcccaatatcttaggagtgtacatttaacctgtaatattgttcctaatatccagggggaagagaatagtattactgccaatatcgtaggggttgtacaccttttctgtgatattgttgcaaatatttagtagagggaaagaatattactcgcaatatcacagggaatgtatacttcccctgtgatattgttctgatatccagaaaaagagagggtaatattactcccaatattgcagggggtgtacaccccccttgtgatattgatcctaatataaaggaaggaagaggatattactcctcatatagaaggggttgtccaccccccttgtgatattattcctaatattcagggaagcagaggatgatattattttcaatatcacagagggtgtgcagtccacctgtgatattgttcttaatattcggggggagaggatgttattatgcctgatatcgcagtagaggtacacccctcaagtgatactgttcctaataaccaggggtgaagaggatgatattactcccaatatcgcaggtggtgtacacccccccatgatggtttctaatatacagagggggagaggaaaatattactcccaaaatcgctggaggtctacaccccccttgtgatattgttcctaatatccaggaaaggaaacgatgatattactgtgaatattccagggggtgtacacccgctttgtaatattgttcctcatatccagggtgtggagaggattatattactcccagtatcgcagggggtgcacgacgcccctgtgatattgtttttcatatccaggaggggagattattatcaatatggcaaggggtgaacaccccctgtgatattgtacttaatagttaggttggcagaaaatgatattagtctcgatatcgcagggggtgtgcactccgcctggtgatattgcttttaatatcaagggggagaaaatggcattactcccaatatcgcagggggtgtacaccgctcatgtgatattgttcctaatatccaggtggagagaacataatattactcccaatatcgcacaaggtgtacacccctcctgtgatatggttcctaatatccatgggaggagatgatgatattactcccaatatcacaggggatgtacaccacccttgtgatattgttcctaatatccagggaagaaaacgatgatattattgtgaatattacagggagtgtacacactccctgtgatattgtttttgatatacagggtgggagaggatgatattactcccaatatcacataaggtgtacaccccccgtgatattgttctaaatatttcggtggggagaaaatgatattagtctccatatcacagggggtgtgtgctcctcaggtgatattgtttttaatatcaagagggggaggagattatattactttcattatcacagggggtgtacacccctcctgtgatattgttccttatatccaggcgaggggaaaataatattactctcaatatcgcaggaggtgtacacaccccatgtgatattgttcctaatattaagggggaaagaagataatattactttcaatatcacagggtttgtactcctttcttgtgatatagtttttagtatccagggggaaagagcatgatattactcccattgtagcaaggggtgtacacacctcctgtgatattgttcctaatatccagaagtggtgaggatgatattactcccaatatcgcagggggtatacaccccacctatgatattatttctaatatccatgggaaaagagtatgatattacacccaatgtcgcagagggtgtgtatttttcctgtgatattgtttctaatattcaggcggggagaagatgatattactctcaatatagcagaaattgtacatccccgctgtgatattcttcataataatcagggaaaaagaggatgatattactaccaatattgcaggggggttacacttcccctatggtagtgttcctaatatccaggaagaaagaggatgatattaatcccattatccaggaagtgtacacccaccctgtcatgttgttcctaatatccagcagggaagaggatgatattacaccccccccccgtgatattctccttaatatccaggaggggagaggctgatattactggatatatagcaggggtgttcataccttctgtgatattgttcctaatatccagaaaaggagaggatgatattacttccaatatcgcagaaggtgtacacctccctgtgatattgatcctgacattcagaaggggagaggatgatattactcaaaataccgcagggcatgtgcattcccttgtgatattgttcctaatacccagaagggaacaggataatattactttcaatatcgcagggagtgcacacccccctttggtatggttcttaatatccagaaggaaagagggtgctattactttccatattgcaaggggtgtacaccccactgtggtatggttcataatatccaggcagggagagggtgctattactccccacagtgcggggcatgtacaccctgctgcggtacggttcctaatatccagggggagagaggatgctatgactccctatatcgcggggtgtgtacacccctgtgtggtatgttttgtattctccaggaacggagagggtgttgttacccctcatatcgctggaaatgtacactcccctgtggtatggttcgtaatatccaggggattgagggtactgttacccccatactccccatatcgtggggggagtgcacctccctgtggtatggttcgaaatatccagggtaagagagggtgctattattccccattttgcaggaggcgtacacccccctatggtatggttcgtaatatccggggtgaggggatgctatcaaaagaagagagaaagagaccccccatattgttctatattattttatactcagtacctgttttaagaagaaacaaggaagtgaaaccaaaagcaggcagcccggcgccaggcaccagacccaaaaccagacccgaaaccaggcctgggcctgcctgaccttagcctgatagttaaaattcaacccatgacctagcaaccaatgttatccatagattccagacattgtatggaaggacattgtgaaatttcttgttctgtgctgtttcactctgattaccggtgcctgcagcccctgtcacatacccactagattgctcaatcaatcatggccctttcatgtaagatctttagtgttgtgagcccttaaaaaggacagaaattgtgcactcaacaagctcggattttgagacgctagtctttcgatgcttccagctgattaaaagccacttccttcactacctcggtgtctgtggggttttgtccgcgactcctcctgctacactatgactccccatatcaaggggggtgtacacccccctgtggttcgtaatatccagcaggggaaaaggtgctattactccccatattgcagggagtgtacacccccttgtagtatggatcgtaaaatcaaggggggagggaaggtgtaattatccccatatctcagggggtgtacacccctttgtggtaaagtttgtaatatccagggatattacagggatattatccccaaattaatacttttataatttcttatgcctgcctttactgcaatctctgaacataaattgtgaagatttcatggacatttatcacttccccaatcaatacttttataatttcctatgcctgtctttactttaatctcttaatctcatcatctttgtgagctgaggatgtatgtcgcctcaggaccctgtgatgattgcattaactccacaaattgtttataaaacatgtgtatttgaacaatatgaaatctgggcaccctgaaaaagaacaggataagagcgatgttcagcgaacaagggagataagcataaggtctgactgcctgtggggctgggcagaacagagtcacatttttcttattgcagaaaatgagtaggagaaatatcactgggaagggaacgcattcctaggggaggcctatggacggccgctctgggggtgtatcccttatgtggttgaagataagggatgaaatacaccctggtcccctgcagtgccctcaggcttgctaggattagaaattccagcctggcgaattctagtcagaccagttctctgctcttgaaccccgtttcctgttaagatgtttatcaatgacaatgcgtgcacagcaggacatggaacctcaatagtaattccattttctccctggccttgtgaccttgctaggcccttctgcccttgtgatcttttattgccatttgaagcatgtgatctctgtgacccactccctattcgtatccccctccccttttgaagtccctaataaaaacttgctggttttgcagatcaggtggtcatcacagaacctgccgatatgtgatgtcaccccggaggctcagctgtaaaatttctctttcgtactctttcactttatttctcagaccaggtgacacttaaggaaaatagaaaagaacctactttgaaatattgggggctagttcccccaatagacattgttcctaatatccagaaaaaaagaagatgatattactcccaatatcacaggggttgtgaaccccacctgtgatatggttcctaatatccaggaagggagagaatgatattactctccatattgcagggggtgtgcacatccctgtgatattgttcctaatatccaggggaggagagggtgatattactcccaatattgcaagggttgtaaactccaccctgtaatattgctcctaatatttaggatttagggggggagaggataatattactcccaatatcgcaggggatgtatatgccctctttgatattgttcctaatatccagggggggagaggataatattactttccatatcacaaagagtgttcacccccctgtgatattgttcctaatatccaaaaaggaagaggatgatatcaatcccaatatcacaggaagtgtacaccccccccttttatattgtttctaatatccaggggaaatgagggtgatatttctctcaatatagcagaatgggtacactccccctgggatattattcctaatatccaggggaaaaaaagaggttgatattcttcccagtatagcagggaatgaatacaccctttgtgatattgcttctaatatcaaggggaaaagaggatgatatgactcccaatatcacaggggatgtaaacctgtggcgttgttgctaatatcaaggagggaagagtatgatattactcctaatgtcgccgaaggtgcacactttccctgtgatattgttcctaatatccaaaagggaagagaatgatattacccccagtattgcagggtgtacaccacccctgtgatattgctcctaatacccaggaaaaaagagaatgctattacccccaatatctaaggggacgtataccttccctgtgatattgtttctaatatccaagtggggagaggatggttttactctcaatattgcagggagtgtacactccccctgtgatactgtttctaatactcgggctgggagaaatagtattactcccaatatcgcagtgatattgtttccctgtgatattgtttctaatatctagtgggggagataattatattactaccccatacacaggggagggtgtacattcccctgtgatattgtttgtaatatccagggaaggagaggatgttactcccaatatcacaggggttgtacaccccttttttgatattgttcctaatatctggggggcagagaattatattactgtcaatatcacagagtgtgtacaccccctctgttatattactctttatattcagggcggtagaggatgatattactccctatatcacagggggtgttcacccctcctgtgatattgtttataatatctaaggggaaagaggatgatatcactctcaatatcaaaggaaatgtacacctttcctgtgatattgtttttattatataggggggcagaggatgatattaagaacaataccacaggggatgtacacccacgtattgatattgtccctaatatgtatggggaaagaggacagtgtaactcccgatatcgcagagtgtgtacacccccttgtgatattgtttctgatatacacggggagaaaagataatatttcttccaaaattgcagggggtgtacaaccccctgtgatattgtttttaatatccagtgggggagagaatattactcccaatattgcagggcgtgtacacaacccctgtgatattgttcctaatatccagagtaggggaggatgacattactttcaatatcgcaaggggtgtacattcccctgtgatattgctcctaatatccatgaggggagaggatgatattattcctaatatggcaggggctgtacaccttccctgtgatattgtttctaacatccagtgggggagaaaatgatattactccctatatcacagaaggtgtacactttccctgtgatattgttcctaatatccagaaggggagaggataatattactcccaatatcgcaggaagcttacaactcccctgtgatattgtttctaatatccagggaggtagggatgatattactcccaatatcgcaggggatgtacactcccccgtgacattgtttctaataaccagggggtgagaggatgatattacgcttaataccgaagggggtgtacacacccttgtgatattgtgcctaatagccagggggaagaaaattatattaattttaatatttatggggaaaaaggatgatattactcccaatatcacaggggctgtacaccgaccttttgatattgtttttaatatccagaagagaagaggataatattgctcccaatatcagaaaaggtgtaaaccccttctgtgatattggtcctaatatccagggagggagagaataatattactaccaatatcacagaaggtgcccacccccaaggtgatattgctcctaatatccaaagataatagggtgatgttactcccaatatcacaggaggtgttcacaccccttgtgatattgtttctaacgtacagggaagggagaggatgatattattcccaatatcacaggaggtgtatactcctctgtgatattgattttaatattcggggggaaaggatgatattactccctatatcgcagagggtgtacaccctctgtaatattgatcctaatatccagggcgggataggatgatattactcccaatatcgcagaaagtctacacaacccccagtaatattgtttttactatccagggggaagaggatgacattactcccaatttcacagagtgtgtacactcaccatttgatattgtttctaatatctagggggagagaatatattactcccaatatcacaggaattgtacaccacctctgtgacattcttgtgaatatccggggaaaaagagaataatattactcccaatattgcagagcgtgtacacccctccatgatatcgatactaatatttttttaaagaggatgatattactcccattgtcacaggatgtgtacaccccccttgtgaaattgttcataatattctggggggagagcataatattactccccatatcgaaaaaggtgtccaccctccttataatatggttcctaatatccaggatattacttaatccaggatacttgtaataccctaaatatacaattgcttgaacctccacctcccaggttcaagcaattcttctgcctcagcctcccgagtagctgggactacaggggcacaccaccacacccagctaatttttttttcttgtatttttagtagagatggggttttgccatattggccaggctggtctcaaactcctgaccttgtgatctgcccacctcagcctcccaaagtgctgggattataggcgtgacccaccgtgccaagccaggaagaggatgctctatagatttccccaataagagatggctttgcagggccattccaaaatatgtcaaagaaatacatttggggataaaatactttgatttcctttagggaatgttatctattatgtgatgctataccagagtcaggttggagtcggttatcttattgcaacaaagagtctgttccgtcactgttgggatctctattttttcctcttatttcttgagacagggtctcactctgtcacccagtctggagtgcagtggtgcgatcttcattcactgaaacctctgcctcctgtgttcaggtgattctcgtgcctcagccccttaagtaactaggattacaggtgtgcgccaccacacccagctaatttttgtattttcagtagagatggtattttgccctgttggccaggctggtcttgaactcctggcctcgtgtcatctgcccacctcgacctcccaaagtgctgggactgcaaatgtgagctattgtgcccagccaggatctctgttttaatgttagtgctggtcactttgcatgaactccaaagggaagaaatataatgaggtgtgtctgaccccctgccttctcatcgtgacctgaattagtttttcaggtttgcaggggatacccttggacaagaaggggctctattcggttggttggggggattagaattttactttttgtttacaatatttctcctgaaagagttaggggctcacaaggaatttccgcgtgagcaacttatgaggaaagccatctgggaagatatgtgtccttgtgtcactgggatattctcgtttaccccaatgatacggcaatgacgcagggttgtgaaattacagctatgtgtttggggaaaaaagaaagcaggattgtgtgactacgtttccaaacttcacttgcccttagccatagtgagttgggggcctggagattctgttttctttcacaatgatatagatacaattaaatgtatagaaagcaaaaaaataaaaaggtgagtaatgaggaacctctgattcctgagtggccatgtagttacccatggcacagagccacagttactgaaggtaaagtttgctggggaatttagaaatgaatccagctcttggaggagtcagtttactggatgcctaagaaaatgcaaacaaaataagaaaaaagggtaatattcaatcccatagttattgttacctgtcatagctaaagtaaaattaaaacagagtgctggcttcaatcttgatgctacactaagcttagatttcagtgaatgtgagtctcagccactagctcagagccacctcccaaagaccaaatcatgtagggacaatagaaagtacttctgagaattgtggttaccaagaacctagtaactgttggggaggagcaaaacaaagtacagaaaccagagggtacaatctgagtgagactgctatcagcttctggaggagcctttactaaaatgaatgatgagagtaactggatgatgagagtaactaatggatgatgagagtaagcaatgtctttggttttcttttttttttttttttttttttagcagacgtctcactcttgtcgcccaggctggagtgtaatggcatgatctcgcctcactgcaacctccacctcctgggttcaagcaattctcctgtctcagcctcccgagtagctgggactacaggcactcatcaccacacctggctaatttttgtatttttagtattttctggtgagggtccaggtttccggaaacaactcagagacatatgttaagatgttatctttagttttcacagggaaccaaatatgttacgactccaatttccttggctattgttttaagttaccattaccttctcgttgatcaagttgctcatttacttctcaagcctagctagatgcctggaatttcccttgaaggaagtcaagattttcctttatctccatactggctgatggtgatcgagtaagcccctaagaggggtccctgctccatctcgagatgctgctagattctacagtgcctaataaacagctctcgcctggccgacaaagagctgcttgctctctggatagcaattccaaagtgaacagacaacatcctgtttggaagactgccactctgttagaagaagcatcaggaaaacctttcttttgagctatttataactaacagcaattgaccaagtatacttttgtgagtgaaactgacctttctccctgtaagaattctccaaaatttggaaactatttgtgagtatttttacttatggcaatataattattggcacaagctcaatcagattcggttttctttcgtaacaggaaccattggagatactcattactctttgaaggcttacagtggaatgaattcaaatacgacttatttgaggaattgaagttgactttatggagctgataagaatcttcttggagaaaaaaagactgggtatattttcaatatgctttccttttaaggtccctcacctgtggaaagtaaagaatgtcactttctgacaggctcaggaacctcaagttatgtagggatctcaagaagatgggggaattcacccagttcatacaggtgaaattgctgttgcaaagattatgaatatgagagaagtccagcatggctgacttcatctcgtgtctggcctcaggctggctgcccttgctcactcttgggcataggccaagctagccatgggaggaatttagtttatagtttaactttgaagcacggatgataatagtctctccctaaaatgaaccccttccttgctcagggactgaaactacctttgtatgacaaatgaaagcccacaagattaagattatgagaggggcctgaattctgctaaaatgcaggtgtagctgactgataacaagtcattgtcccacagcttgcctttctataatctcttgcttctcaggagtcacatggccagaggtcctgagatttccagtcctgtgacccccacccagagatggacttagtgcatgaggaccattttccacacccctatgatttcatcctcaaacaatcagcagcaaccattccctagccccctgccttccaaattatccataaaaatcctagcctctgagttattagggagattgattaataatcccagtcctaccccttgggttgctctgatttaattaaaccttctctactgcaataccacggactcagtaaattggttttgtctgtgcaatgggcaagaagaacatgttgcatggttatacaggtactacaagcacagtctgatggcaaattattggttttgcttcctgcccttgatgtttctaaacatctagtccaaaattacttgtgaaaggtccagcaaagccaattttaaaagaggctatatggccaatcactattctttctacacattattgcaaataatcaggccacggctgggcacggtggctcatgcctgcaatcccagcactttgggaggctgaggcaggatcacctgaaatcaggagttcaagaccagcctaggcaacatgataaaaccctgtctctactaaaaatacaaaattagccaggcatggtggcatgcacctgtaatcccagctacttgggagactgagggaggagaatcacttgaacctgggaggcagagattgcagtgagctgagatcacaccactgcactccagcctgggcaatagagtgagactttgtctcaaataataataataataatcagaccaagtataatgaaattaaaatttattttgcaaataaattggtcctactacaatttatccttcatagaaatgtggaaactgaagataaaaaaaattaggtttcagaagaaaactatactacacctgttattagattctagccctaaacattgtttttgaggtttttattatttacctgcaatttggtctaaattctgaattatttcctgactacaagtatccaaggaataaatgggttttctttttctttatgatagttttagttggcttctaatgcaacaacaatttttattgtaatcctgtgtgcattctattcctactattcaaattattaatgttatagatctttcattgtagtacttctgaattaaccaaaatcacagtattctgaagatgattctacaaagcctgctgtttctacaaaggctgctgatgatttctacaaagcctgctgtagtgttgctgtggcctctgcttaaaaaagtagaaaacacattgatgcagcatgttcaccccaacctccctgcctaaaggctcagggaccatcttggaagaggaaggcgcgtgagattgtaagagccgaattagggggatggagtgtggagaataaggacacttcatcttggatgctcacctgccaaattgacttctgatgaaagccagctccagaaatgtgcctacagttactactttcacctaaaccctgcccttagtcaaatccttctcttcttctaagcaatcaacttcaattccttgtataacccacagtataaaagggcttttataccattctatcctattgcatgtaagccttgggtctgggaggtaacagtgtgggattccaccatctcatctccctgccacccaaacatgcctgctcttctttaagcaatattaaatgtttgtacttcagaaatttgatttgtcagcctcttcttcagactctcagcttctttggcctttgggagtaaatttgcataggcctgctcaaaacaggatgttctgggggtttgggggtgttgttttgttttgttttttgttttgtttagagacagggtctcactctgtcacccaggttggagtgcagtggtgcaatcatggcacactgcagcctcaaactcctaggctcaagcaatccccccaccttggcctcccaaagttctgggattacaagcataagccaccatgcccagccctggacttttctttaaagacatttacacagtgtaggaattactgtgggtgcactgctcaggtccccttctccaggatgctcattcctacctcatagatgattttcctgcagagatttgacctcagctgaagggcagtcacctggtccaggtggttgctattcacctccttcctgagaacagccaacagccagggacacgctagcacagagatataagagcgaccaaggtgaggccccttctgtgctgcggtgcatgctccagagcctccctgggatcagacttaagagggtctccagccagatctggtcttcgctgctttcctcgagctccccagcgcactcctgcaatgcatcttttttttttttttttttttttttgagacggagtttcactcttgttgcccaggctggaatgcaatggcgcaatctcagctcaccacaacctctgcctcgcgggttcaagtgattctccttcctcagcctcccaagtacctgggattacaggcatgcaccaccacgcccagctaattttgtatttttagtagaaacgggtttctccatgttggtcaggctggtttcgaactcctgacctcagttgatcctcctgcctcagccttccaaagtgctgggattacaggtgtgagccactgtgcctggcccaatgcacctcttgaatcacctcctcatgctttgcttttagagaacatgatccccaacatgtgattccagcaaagattctagaaagccaaccgtgacaatcacttctgggtttagatgacccccccccaccacaagatggcagtgagcacctcatcacagaggtgctgatggtctgcagcaccgcgccaggccagaacgtgccttttacagaagaaaataacccagtagctgactaggatggtgaggagggctggtgagcactgcggtagtgagagggacactagcatcactgagatgcaagtgatggtcatttttcataggtcaaagctcaaagcaggggacagttacagggcagggcttcatagcaccagtgtgatgaaagtatctgggagtggctaaggccagcactatgccatgggaagcaaggtgggcctgaggaggaggcagcagcgtcagcctgcaacaagtgggggctgccctgcagagacctaagagtcatgttatagagcacagtgtctgtaaggccaagaagtgtggacagccaagtgtgtcaattactagacatactcaagaggagcaggaagggcagggcatggtggctcatgcctgtaatcccagctacttgggagactgaggaaggagaatcgcttgaacccgggaggtgaaaattgcaatgagccgagatttcgccactgcactccagcctgtgtgatgggagcgggactccatctcaaaacaaaaaaagaaaaaggaaaaagaaaaaaagaaaaacctaggtatacttctcaagcaaataaaaataatcaaaaccaatatcatgcccgggcacaaatttcatatatataacagatttaaatatatgagggtgattatcctctcatatctccatttttttttgtttttccatttttttctttactaaaaaaagttaatgccaatgacacacaatttttttttttttttttttttttgagatggagtctcacttcttcgccctggctggagtgcaatggcgtgatctcgactcactgcaaagtctgcctcctgggttcaagcaattctcctgcctcagcctcccaagtagctgggaccacaggagtgagccaccacacccagctaatttttgtatttttaatagagacggggtttcaccatattggccaggctggtctcaaactcctgatctcaaataatctgcccgcctcggcctcccaagattctgggattataggcgttgagccactgcgccccgcctatgtatgattttttttttaattttattttcataagtttttggggaacaggtggtattttgttacatgagtaatttctttagttgtgatttgtgagattttggttcacccatcaactgagaagtatacactgaacccaatttgtggtcttttatccctcacccccttcccaccctttcccccggagtccctgaagtccattgtatcattcttatgcctttgcatcttcatagcttagctcttgaacccttactttctgtttgagggagaagacatatcatctacaagtagatactgtgtaaacattccattgcatgactatcccataacttatttattatttgtgtttggttatttgctgctatgtaacaaccccactcccaactaaatggtgtgacaattccatgattctgtggatcaaaaattctgaaaagtcaaacccaaggagttttgtctctgctccatgatgctaaagcctccgcaggggtgaggcgaatggctcagggtgactgaaaagctcagggttggaacagctggggatgaggcctctatgtataagatgattcttcactcacaggtctgaaactatggtggggacagccagaaggctcggctcagctgggacagtcacctgagccctacacatgacctctccaacatggtgatcctgaagcagttgggtttcttacacagcatcacacttttcttttttttttttttttttgagatgaaatattgctctatcacccaggctggagtgcagtggcacgatctcagctcactgcagcctccgcctaccaggttcaagcgattctcctgctccagcctcccaagttgctgggattgcaggcgcctgccaccaagcccagctaatttttgtatttttagtagagacggggtttcaccttgttggccaggctagtcttgacctcttgacctcaggcgatccgcctgcctcggcctcccaaagtgctgggattacaggcatgagccaccgcgcccggccaaagctcacacttcttatgattcagccttagatgtcacatcagttcattttccccacacttattagtgttagaagtcacaagcccacccatactcaggggactggcacacagaccccactctcaatggaaggggtgggacaccaccattcctgctgatgggcatttgggtaacttcctgtttgaagctattaagattgggctgctgtggccgggcgcagtggctcacgcctctaatcccagcactttgggaggccgaggcgggcggatcacgaagtcaggagatcgagaccatcctggctaacacggtgaaaccccgtctttactaaaaataccaaaaaaaaaaaaaattagctgggcatggtagcgggcgcctgtagtcccagctactcgggaggctgaggcaggagaacggcgtgaacccgggaggcggagcttgcagtgagccgagattgtgccactgcactccagcctaggcgacagagcaagactccgtctccaaaaaaaaaaaaaaagattgggctgctgtgactattctagtaggtgtctttggtgagcgcctacacgtgtttctctttttctctttagtatatgcccaggaggggaactgctggctcccagataccgtatgttcagggtcacacacacttccacagggttttccaaagcccttgtaccagcacgcactcccagcacctgtgtgactgctccagctgtcccacagtctcatcagttctattgctgatattttcattttagcttaagttatatttaataggaaaattaccgttgcctctgccccccgttcctgcctgtaggagtttctcgtagctgttgctacaggtggccacaaatctgtcacttaaacccacacaaattgatgtccttatggctttggagtcagaagtgtcaactgaaggtactagcagggctgtactgacctggtggcctcagggagcatctgtgctgcttctccaccttctagaggctgctgcatccctcgctccagccccttcctgacaccactcaccctcctacttctgttatcacatcctcaccttctctgtgttcagggctccctctgtctctctcttgcaagcacacttgggattccattgagggccacccacataacccaggagaatttctccacctcaatatccttaacaactgcagagcccttttgccataaaagttaccattcacgggttccagggattgtgacatgggtagctttaggagtgattattcctgcctgtctcccgctcaccagaacttggactttctctctcaacaggagccccctgtgtgggaatagcctgtctcaacgacgccctctataaggacctgcttcctcaaaggacctcatagtcgggtcctgcccctcagtgtccagtctgccttggctggaggggctgcaggggtgtgttggcgccacctggtggagacagggcatcacagcaggtgggagcccagtagaagcacaaccaaaacatgggtaatgtttaaaattttctggctaagcgctgtggctcacgcctgtaattccagcactttgggaggccgaggtgggtggatcacatgaggacgggagtttgagaccagcctggccaacatggtgaaacatcccctctactaaaaaatacagaaaaattagctggacatgtggcgcgctcctgtaatcccagctactcgagaggctgagacacgagaatcgcttcaaccccggaggggttgccgagatcgcgccactgcactccaggctgggcgatagagcgagactctgtctcaaaaaaaaaaaaagaagaggggaggcgaggggaggggaggggaaaagggggaatttgtttggagctgagacatccatcttctcctgacctcagatatttgcactcctggttatgaagccttcacacttggactgaatacaccaccagctttcccgatttccagcgtgcaaatggcagatcgtgagacttctcagcttccataattacatgagccaatttatatatataaattgggtcctccagaaaaacagaataaattatatatataattatacgcataacttaattaaattatacgtataacttagctatatatataatttattctgtttttctgaagaaccctactgacacaaatgttgagcatcttttcatgtgcttattggcttaataacttgtacatcttctttggggaaatgtctattcaagttctttgcccattttgtaactgaactattaatatttgtctttacattgttgagttgtaaaagttccttatatattctagatactagagccttatcagatatatttctgcaactattttctcctaatatataggttgtgtttttattttctttttctttttttttttattgagacagtctcactctgtcacccaggctggagtgcagtggcatgatcttggctcactgcagactcgacctgccaggctcaagcaattctcccacttcagcctcctgagtagctgaggttataggcacttgccatcgcacccagctaatttttgtattttttagtagagccgaggtttcgccatgttgcctaggttggtcttgaactccctgcctcaaagcgatctgtcagcctcagtctccctaagtgctggaagtacaggtgtgagccacagtgcccggccatctattttcaatagtgttttttgatgtacacaggtttggaattttgataatgttcaattcatccatttttttttttttttttttggttctttctactggaccaccactcttgagccctctaatccaacctccacgcggcagccagagggagctctctaaatgtaattactctttccctgctccacctgctcaaaacagtgtcacatttgtgatttaaaacagtatttctcaaacctaatttgcaaacaaagcaggtggaactcttcttgtatgcacagcatctgatttggttggtctggcatgggtctgggagtgagcacacctaccaagcggctgctggggtaacttgcgttttccactgatgatttcagcaatgtttccggtcccacatgctcctccagaaccttgtactcccccatgaaaaggtggagtccatttccccttcctttatttatttttttgagacgaagtttcactcttgttgcccaggctggagcgcaatggcgtgatctcagctcaccgcaacctccgcctcctgggttcaagcaatgcttctacctcagcctcccgagtagctgggattacaggtatgtgccaccacgcccagctaattttgtatttttagtagagacggggtttctccatgtcggccaggctggtctcaaactcccgacctcaggtgatccgcccgcctcagcctcccaaagtgctgggattacaggcgggagccaccgcgcccggctatttccccttcctttgaacctgatcaggacttgacgatggcatcaacatggtgagagtgaccctgcatggcttatgaggctgggttacacaaggcgatgttgcttctgactggctccctctcaggatacatgcccttggaacccatcctctaagctccttgggagcccaacttagcccatgtggagacaagacagggagagaaacagaggcacccccagccctcagccagcatcaaccgccagacaggagagcaaatgcgccaacaatgattccagctgaagcctcagacagcgtggagcagagatgagggatccctgcagattgcagatgcgtgagcaaaatgcatgctgtcactgttttgaaacaacaatgtctgggggctgtttgttatgcagcaatagacagctgtaacaatgctgttactgctgtattccatgaatgactgcactttgagtagcagggggctagatcactagataagccccatggcttctgtgtatgctatttttctacttttatatccttttcattcactttttttttttttttttttgagacagagtctcactctgttgcccaggtgggagtgcagtggtgcaatcttggcggactgcaacctccacttcccgggttcaagcaattattgtgcctcagcctcctgagtagctgcgactatagatgcacccccatgcctggctagtttccgtatttttagtagagacggggttttgccatgttggccaggctgatctcagactcctgacctcaggtgatccacccaccttggcctcccaaagtgctgggattacaggcgtgaaccactgcacccagcctcattcactttctttacttggctcatttttccttgttgcctcaattctcctctaagatcactttcctgacatttcagcctgggcctgttgccttctctgggtcccctccgcctcctgtgcctcccccatctcagccttgatccctcagattatacttcctctgtccccaccctgaccatcttggctgtccctggatagggatgggtatcttctcccactggtctgggagatctggaaggacaggcctggaaaagacttggtcactgctggaaggagctcagttagtgtggtgctgaggacagtacgggtgaggctggccccttcacccaaactcccactctcttccatagatttcacctctgtggcccaggccataggattagggcaactccccttaaacatcgagtccatcctccaagctgtccttttttttttttttttttttttttttgagacagagtctcgctctgttgcccaggctggagtgcagtggcgcgatctcggctcactgcaagctccacctccagggttcactccattctcctgcctcagcctcccgagtagctgggactacaggagcctgccaccacacccggctaattttttgtatttttagttgagacggggtttcaccgtgttagtcaggatggtctcgatctcctgacctcgtgatccgcccgcctcggcctcccaaagtgctgggattacaggcgtgagccatcgcgcccggcctcatgctgttcttgaatagtgagcacctgttacaagtcgccccaccagcctctcacttgtacccccctcatctctttctccccaagagacagaggaccctggcacttgtgaagcatgacccagaccctggggccatggcatccaacatcctcattccccatgacccctactgtctagatgtagctgccaagagacccccagactccccgggcctctgtctagagtgccaagacagagagagaatgccctgccgcttgcatgctttgtggggtgtccttcccccttccctggctgctaggcgtgacttcaacgttctccccaacccccaaacagcagcactgacaccagctgcagacctggctcaggttagctaatgaggaccaggctggggatggagcctgaacccctaaaccccagtcctgtaccccaccctaatcctggggtctccactggacaaaacgaagcagcttggtttttcgttgttattgtttttgagatagagtatctctctgtctcccaggttggagtgcagtggcgtgatctcagctcactgcagcctccgcctcccgggttcaagtgattcttgtgccgcagcctccccagtagctgggattacaggcgcgtgccaccacacccagctaatttttgtatttttagtagagacagggtttcaccatgttggccaggctggtctgaaactcctgacctcaagtgatttcccagcctcggcctcccaaagtggaagcggcttatttttaaggagaaaactcccgtggaaaggaatcagcacctcctctgtcaacatttcacttctctgaaaagactctcacttccaacagaaagtgctttgtaacacaacaatgaggctgggcgaggtggctcatgcctgtaatcccagcactttgggaagctgaggcgagtggatcacgaggtcagaagttcgagaccagcctgaccaatatggtgaaaccccgtctctactaaaaatacaaaaattagttccgtgtggtggcgtgagcctgtaatcccagctactcaggaggctgaggcaggagaatggcttgaacccaggagatggaggttgcaatgagccgagatcacgccactgcactccagcctgggcaacagagtgagactccgtctcaaaaaaaaaaaaaaaagaatgagaacatatggacacagggaggggaacaatacacacaaacaaaatttagaaacaggtgaaaataattttagtaatatttttactaatactgatatgctcaaaatattattatttcaataagtaatctaaaaattattgagatgtcttatgttcttttcatcatactaagcctttaatatttggtgtgtattttacactcacagcacatctcaatttgcagtccccatgtttcaagcactaaataaccatgtgtgtccggtggctaccatactggacagcgttgatctgaaatcgcatctgtatgcatcaccagcatatttgcagagatccccatctcagcagcacacctgaggctcatctgcgaaagcacctgcaacttctctacaacctcccacatcacctccaaacacatcctcatgtcatctgcaaacacacccatagctcacaggccaatgcctaaatatcattgcaggcaccttcagagaaagcacttactaaaggggtatacttgattccacatctgctttgacctgcaaatctcccttctcctttacatacatttgcatctcatttgtatgtcaatctaaatccactggcagagcctcagatcatcatctcaaagtcaggtggatgtggggctgggcaggcctccaggtgttcctcctcctgcttcctctggggctcttgatcctcctcctcttccttgctgctctcctcctcctcctccaatatggtgaccagttcctcccgcagcgcccccatctccagccccaggctgcacagctgtcccagcagctggacatccactcggcgcaggttcccctgccagtaggaaggggacgtcacagggatgccaccccagagagcaaggggtctctccaggacctgggtgagagcaggtcccaactcatgtcctggccacagcgcctgggcagggtcctcactgtgcccatggaccctaactgccttcctgcttctcagagtgtctcttgatctctaactcttctctttgtctctccatttcattgtccctgacttctctctctctgtctcctccctctcttatctatatctgtccctgtttccctttgtctctgtccccatttattttttgtctttccatgcccctgtctctctgtctttatgtgttgccatttctctgcccctgcctttggctctctttctctcgcttgccctctctctgccctccccaactttctcaaattcagtctgtctctccatctctgttcctgctctccgtctctgcttcccacctctgtccctctcttttgggatctccctgtccccacctctgttcccgtccctcactctatgtctgtctctcggtgtctgtacatgcctctcatgtctctgcttctatctctcagattctgtttttcgatctctggccttctctatttttgttcatttccattcattctcatttcctctctttctctttcccttccaaacccctcactcaccagctcctccctgatccacagcagactatcgcaggcacctccagtgtctgcccctgcagtcctgagggtctgaccagggatttccactggggagacctccctcagggcctgggggggtgggcccagccccggaggcaccagtccagcctgattcagctgcctccacagttccatcgtctctgagctatggctgcaaggagcaggaagtagcaaggtccagggtggcctggtcccctggggagctgtgtgcgtggtggagagtaaagggcagagggagtgggatgggggttcctgggaaaggtatcccaaagtccactcttcagagagaatcagctggccttgtgcttttctttttccttctgaagtctaacctcaactctgctcacagggttcaaacatagcctcttgcagaggtctaactccacccttccctgcctgtctcaggcctgacccctcaggggcgctcagtgtctgtagatgcctggcaccctctgtccttccacctgccccccaccaccacttctccagcctctcctcagcctccatttgacctctggcttgcccatagcttggtccttgcttgtcctcttggcacgggtcatcctagggctttcccaccagtgtgcctttgggggcaggaatggctcccaggggcaccaagacagcaatcccttagctggagtgcctgtgtccaggctgctggcctagggccaagcagccaattctgctgaccctggacttgcctatgggtatattatccctgttgagggtgagggcttctgctgtggaaaagtctgggaagcactgcaggcctctctcggccttggacccttccttcagacccaaggtgcatatatatacatatatataatggtagatcacgaggtcaggagatcaagaccatcctggccacatggtgaaaccccgtctctagtaaaacacaaaaaattagccgggcatgctgccgcgtgcctgtagtcccagctactcgggaggctgaggcaggagaatggtgtgaacccaggaggtggaggttgcagtaagccaagatcacgccactgcattccagcctggcgacagagcaagactccatcttaaaataaacaaatgaacaatatatatatatatgtattttgttttttgagacagagtctcgctctgtcatccaggctggactgcagtggtgcaatcttggctcactgcaacctccgcctcccgggttcaagcgattcccctgcctcagcctcctgaacagctggggttacaggtgcacgccaccacacctggcgaatttttgtatgtttagtggagacggggtttcaccatgttagccaggctggtctcaaacccctgacctcaggtgatctgcccacctcggcctcccaaagtgctgggattacaggcgtgagccaacgcgcccagccccaagtcccttttaccatagaaagtaacatagtcacagtgcccagggattcacaggtatggggagagggttcgttattcagctgccacacccaccttcctaaacctgctgcccttccagtttcctcacgtgcacagccacgcccgtctgcttttagtttctcaatctgttggcttaaccttcaaaacaggcccaggatttgagcacttctcaccattccctctgccccatccccattcatctcttgcctagactgctacagcagcctcttttactggtcccctgcatccacccttgccctctaaggcaagggtccccagtccctgggccaaggaccagtaccagcccctcgcctgctaggaactgggccgcacagcaagagatgagcagcgggtaagtgagcattaccgcctgagctccgcctcctgtcacatcagcagtggcattagattctcataggaggcaaaccctattgtgaactgtgcgtgcgggggatctaggttgcctgctccttatgagaatctaatgcctgatgatctcaggtggaacagtttcatcccaaaaccatccccaccccacccccgacccccagtctatggaaaaattgtcctccacgaaaccagtccctggtaacaaaacggttagggaccgctgctctaaggtacattctccacctggcagaaataatctttacaaaatgtaaatccgattttgacactcccttcttcccactgtgaatagaataaaaccctaccaggcctgcaccgtcagcccctgcccacctctcaacccagtctcctatctctgtctgcaagctggttcccacctcaaggcctctctgctctagaggctacctctccctgcagcgcttttcccctagatctttgaatggctctttccttatcattcacttctacttcaatgtcacctcttcagagaggcctttgctgatggccctacacccagtcacttttttttatctgcttctcatcaaaattgccttgctgattcctttgtttcttattcatcctctcccacatccatcctctcccagcccagaatgttgacttcctgagagagggactgggtctgtcctgctcaccatggtaacctcggcatctagaacagtgcctgccatcacgtggtaggtgctcagtaaatattcttggaactaatgaatgaataattctatccacaagacttcacaatggctcttcatgctgcgatctagctttcaactccaaactggtcttgagatctcacctcagtctctaaccttgacatctaacctcttcacccactctcttacctgaccctaatttttaaaaatgacgtggtcagcttttcagccccctcattccctgtttttaggaggtagtgagtggaagctggaagaataagaaagcttggggagactgcaattgcagtcaggaaagaaaggtactctgccgggaagaacaccccatcttctcctagggaaagattgtggagtcctggggtttgttttgtttttcaattttttgttttaagagacagcgtctcgctctgtcacccaggctggagtgcagtggcgcaatcacagctcactgcaacttcgacctccccggctcaagtgatccccccgcctcagcctcgtgagtagctgggaccacaggcgtgcaccaccacgcccggctaacattttattttttgtggatataaggttgccctatttctttgtggagataaaggctcccctatgttgcccaggctggtctcgaactcctggcttcaagcgatgctttcgcctcggcctccacaaagtgctgggttcacaggtgcgtgagcccgacctgtgtctcgttttgaagctcagggagagggcgctgtgagcaatccctaaaccctttaagagtaaaaagtgcgtgcacctttaagaggacggttagaaaacgcggggcgtggccacaggagaataagttcgcgctgaaccaggagcgtgggataagaccggccccttccggttacgaaaccttagcaagatggcggctccctgggcgtccctgcgcctggtcgcccccatgtggaatgggcgtatcaggggcatccatcgcctgggtgcggcagtggccccagagggcaatcagaagaagaaaaggacaatactccagttcctgaccaactatttctacgatgtggaggctctgagggattacttgctccaaagggagatgtacaaggtgcatgagaaaaatcgatcttacacctggctggagaagcaacatggtccatacggcgcaggtgcctttttcatcctgaagcagggaggcgcagtcaagtttcgagacaaggagtggatcaggccagataagtatggccatttctctcaggagttctggaatttctgtgaagtgcctgtcgaagctgtggatgccggtgactgtgacatcaactacgagggcctggataacctccgaacctccgcaggctggacatctcggacctccctgccgtgtccaaccctggcctcactcagatattggtggaggagatgctgcccaattgcgaggttgtgggagtcgactgggctgagggcctgaagtcagggccggaggagcagcctcgggacacagccagccctgtccctgcctagcctttagccctgtccccactcacgtggcttctcagcgggctgcatggaatgtctggtagctcaccacacttctggcttccatttgtcttcactcaacgtcagggtgggggagtggtgctggccaatcacaggagagagcgtgagttcccagtatttattcctggctgcccttggctaaaggtcacagctcctgtcaccctgtcaggcagccctttccatgcccctgttcaggcctggggaggtaaaggctcaggctgttagtagccgcagagagccacactcaccttgtcaggagactcttctcaaactgtccttatgtgagtgcactgccatttcttgcagggaccctgactgacacaggggctactactgacactttacagggatggttctcccccgtgcagggccgctgtgcccactgcaggacatgcagcatccttcgccccactccactcactaaaggccagcgcaccccaggccccatagtattgctggttatggatttattgactttatgttccaaattcagctttttcagttggctgtttgaagggtacttgcgggggccacaggttggggagggccctggttggggggctttctggcccgttgttcccccttttccagggtctggcccccctttggacctggtttttcccccgttgtcccttttcttaa

SEQ ID NO: 735316 - DNA, 187760 bp, Homo sapiens
ctccaaggctgagggatgaggagacctgctgaggacccagggccttatctttccatcccactccataggtcccagtattgactgatgctgtcttcacctcctagcctcacttttaaccttctggcacccgcccaccactgtccagttcactattgaagccctgccgtccagtgctgcagagggaaaggatgttcttctactggcctgcaatatttcagaaactattcaagcctattattggcacaaggggaaaacggcagaagggagccctctcattgctggttatataacagacattcaagcaaatatcccaggggccgcatacagtggtcgagagacagtataccccaatggatccctgctgttccaaaacatcaccctggaggacgcaggatcctacaccctacgaaccataaatgccagttacgactctgaccaagcaactggccagctccacgtacaccgtgagtgattcccccatacctctgggtgctggcggtcagttctgcttcacacacatgagattgtcaggcctgggctgtgcctgcatccccctctgcattttgtcccgtgttgagatttgggcatttagtgcaggacacacacatggtaggtaaacttcaacagatcagaattcctttcctgcatccaggccctgcagacactgatggcgggggcgggggggcctcagcagggggaggtcagtctcagccaagcaccccatgccctccccatgaacctgaccctgagaaagaccctggagaactgggtcagggcctggcctgagggcgtcctgggaacctcacaaaagcccagcctcaggactcctgactccgtgtgaccccgggaagcctgtgtcagggctggggtgtggtctcctgggcagggcttactgggagcaaggatttaccagatgtctgcgggctgtggttcctgaagcttctcatcagtgagggctcagctcccagagtctcatctagacaaggacagagcctaccactttccctgggactcagcctggagagggcagggggacaggattactagggcattggccccctgaatgaggagcttaagagatgcccttgggcagtcagtggcccaggggtaggaacagaggggagaaaatgttcctggcagcttcttgtccaccggggatcatgcccaggggtgctctcccatggaggcaaataacagatgctgttgatgtgaacacctcctctgtgccaagcttcatgtcagatcctgtgaataatttaaagttcattcacagacaaagtggcaagcctcagaccattttccatttacatattgtatggaggggaaactgaggcacagagagatacagacaccggccacggtgggcagatcgcagctggcagagtcacatgagggctgtctgcagctgctgccacgtcctctccttcatccctggtgccttactaggtgtctgtggaccttagaacagccactggttcggatgttttcttcttaggtgtctacagctcggagggggagattctggtctggagagttatgagtaaatacagaattaatcagttttttcttaactaaatcacctgcctcaacaatcagtcagtgctggggaagttcaggcctcctcgctcaggtccacaccccgcatctctggacatgaaatggcttcgtgtgttttctgatgtgtgggtatcattccaacaggaggataaaggggaggactttgctttctctccccattcacaccctgcaccagccagggcccagtgtgagacacatactccgtagttctctcatgaaggagggagggaatgaatgaaggaatgatctataacctcttcagagacagagacctggatacaagatcctaggaggttctgggcccaacgtgagacacacactctgtagttctcttatgaaggagggagggattgaatgtaggaatgatctataacctcttcagagacagagatgtggatacaagatcctaggaggttctggccacacctgttttctgtccctctagagcctaagacccatgtctcattcatctggcccgtttctcctaaatctgcccctgggagctgagtctcatctgaccctggggctgcagggctgtgggaaggttttcaggggagggatcaggcttgcgggtagtcccacacgtttgccttacaccctggagctctacctggttctcactatgaatatcccataataatcccccctatcctttctggggagtagaaaaaaagtaaatatttaaaaatatgccagagcatctgttcttcttagcaagttcagatagttattagttagcaggaataaatcgttattttaccagagcctcacctgctgggggtttatgggagcctaactgactgaggggggtgggaaatatccaactccagccccctctagccatcatgtcccacctaaaggagagaaaaaactgagaggcacttgtgacattcacagcccagggcacagactctatccaggaccacagaacccctccctccccccactcaccaccgcatcactgaacgcctgctcacccaagttcctgttgcccagtacatcatgtcctggctttcaacaaaaactacaagacagactagaggcaaaaaaaaaaaaaaaaaaaatgcagttcgaaagacagaacaagcatcagaaccagatgcagatgtggcagggatgtggcagggatgttgaaattatcagaccaggaatttaaaacaactctggggccaggagcggtggctcatgcctgtaatcccagcatttgggaggccgaggcaggcagatcacctgaggtcaggagttcgataccagcctggccaacatggcaaaaccccgtctctactaaaaatacaaaaaattaggcaggcatggtggtgggtgcctgtaatcctagatactcggaaggctgaggcaggagaattgcttgaacctgtgaagcggaggttgcggtgagcctagattgtgccactgcactccagcctgggcaacagagcgagattccatctctaaaacaaacaaacaaaaaacaatactggctaatatgctaaaggctgcaatggaaagcatagacaatgtgcagaacagacggatgctgtgagcagagagatggacaggctaagaaagaataacaacagctactatatctatctatctatctatctatctatctatctatctatctatctatctatatatatgtatatatatgctagagatcaaactcactgtaacacctggatctcagagtggttgtgaggatgtttattaggagattaaagagattaaagcagagttatacacagggcgagagctcaactgatgctatcaactagtattcttatttttttgatgttgttattggcaataaaatcaggaacaatgcagtaaaaatttggttttatcatgtacgagttctgtgaccttccttgacttactgaggtactgtaagtctcagattctaactctgcagatggcggtgatgcccctctccctcaaggtgatgtgaggatgagatgagctgtaggtaggttggtgcccactgtgcctggcacatggaaggcccctgaaaatagtcaatgaacatcatccccgctcatcagcatggagttgacagtgagggctcgctctctgtgacaatcatggaatggaaaagaagaaacaagaggaagactgggcgcagtggctcatgcctgtaatcccagcactttgggaggccgaggcgggcagatcatctgaggtcaggagttcaagaccagcctggacaacatggcgaaatttcatctctactaaaaatataaaaattagcctggcatggtggcacaaacctgtaatcccagctacttgggaggctgaggcaagagaatcgcttgaacttgggagatggaggttgcagtgagccgagattgcgtcagtgcactccagtctgggtgacagagcaagactccatccaaaaaaaaaagaaaaagaaaaaagcaacagagggaagaggtgtgacatgagaggaagaagggatttaaaggtacaggagcagggcgaggtgcaagcacctgtgggagaatgtaggagttggtacatcccagtgtgtcaagtctgagacacagaaaatggtgcaaccgtggagagcaagggagtcagctatgaggacagcccaacagaccacactcaggctctggagcatttccttcctccctgactatgcccctgccctgcaatgccccttatggtttcccttggaacaaacttgggccttgtcccctttgccttcccctttctgcagaaaacaacgtcccaggccttcctgtgggggccgtcgctggcatcgtgactggggtcctggttggggtggctctggtggccgccctggtgtgttttctgcttctctccaggactggaaggtaccgcagcttttccccagcctcctcccacccctaggctgaccccagtcagggaggagggagaccccgccctgtattcagggccaggctttccgcatcctcccaaggaatccttccctctcattccatggctcctcccttgccagctgctgatcctaggctgcctcttcctttatgaatgtggcacagttaaggttgcacccctgagtgctgtcctagttccctaacacagcaaagccacagctgcctggagggaggaagggagggagggagggagggagataagacgggagtgctcagaacctggtaccttctgctgttcattgaatttacccacccagtgaggagggatttgcaggcttgagatccatggtgggggtcctgggcatggtcacgcagtggggagtggcaaagcctggacaggctgggtagggtcagcaccccatcgtgattgatgtccctgaggtgtgagatgggagaacctggacctcaggacctgctgtcctttatgtctcttgccaaggggtggagagagagaggacaaggccattgccccatttcagcatctccaggcctgaaaggagggtctggccatggcagggatactgagttctgggagaatatgatacatgctccttgcctccccatgcccccagctcccccagtgtcctgcacacacagccggccctgctttccctctggggccttgacccttcctctcaggcaaacgcaggtggtctgattccctccctgagtcctcagtccctttcctgggtccctgggtcaatgttctcctcacccggcatctgcctgggggggtccttcctctctggccaggacagacgtgactgcttaaggcctatcctcagctccccgtcctcggccgctcctaccacgaaactgatggagacaggaggccttcactccagtccttgaaaatggagtcccttccttgtcctttattctgcccctaaacctgtgatttctccctgcaccctcatgaataatcctgacctttcctagggccagcatccagcgtgacctcagggagcagccgcccccagcctccacccctggtgagtgtcccttcagcccaggtgtgggagcccctaggcctgccctacggtgtccactcctgccagtcaccccctgggggcctctgaccctttctttggggctgcaaggaggatgtcaggaaacatgacacaggggaccccgactgtcttgttcagactgatctgtgggctctgggtcgtgggtcacctcctcgacctcagctgctcaggtctcccctgggaagaggctccctctccctgattctctgggagctgaggacccctacactctcctgcaggaggggcccaggctctcctcccaccctgctgctcactcctgtctctgtccccaggccatggtccctctcacagatccaccttctcggtaagcctgttccctccccagcccttttctactggggtcccaacagtgcaggctcagggcagggggaccatcaaccccacagcacagcactgacccacctttccccagaacagtcaggtcaaagtgagtgcctccagccaggatccgggcctctctacagggccaggaccacccacgccatgtgctgacccctccccgggaccctctacacctgaggagaaccctggagtccagcaggtgcagaatggacactgggaccatcagtcagaggcccacattaacaagggtgcggggtgggcccagccaggacaggggtcagggtgttgtgtccacactgggaggctgagctcaggggcagagctggtcaatcctgaggggaaatgagtggaagtggaggcagggaagtaagtcctggccgatcagagacaggaaccttccaggctgggcttccgtgaccctccctccctgtcccctgacatctcctctctcccctgcccaggcccctctacccagccccagaacagccactcccatctatgaggtgagtgtgggccatggatgttctggtcccgcaggctccaggggacccaggatctgcccccaccagcacctggctgagctcagattcaggaaaatgcagtgaaaatgagaacaggtggtggtgagcagaggagggaggggcctgggaacagggaccccctgagcacagccaggttcagccccagagaagccctgggtgggcccagagcctgggagatgccagacactgttctgagaaggctacaggggttgaggcctcttctctgtttttacaggaattgctatactctgatgcaaacatttactgccagatcgaccacaaagcagatgtggtctcttaggttcctctgggagctgctcttgtgggttgatggagcgtccccaaagctcccagccctggggacggggaaggacatggagcctgagccagagaaccagctctgagtcctgaggagacacaggcctggggacagggagggatgggagtccctgctgaatatctggagaccctgacaggttgccctgggctctgggtgggccgggacaaaggcctctcatcaccacaggaagcgggggcttgcaaggaaagtgaatgggcctgtggcccacccggggtcaccaggaaaggatctgaataaagaggacccttcctctcattggctctttttctgctcacgggaacttagcagaaactcacctgaaactccgtgtccattctctcccgggtcacacagggaaaatatctccaccttgtctcaaccacagtctctcttccctgggaggcagaaataggggttgggagtcaggctggggtgggccctacacaggaaagggcaagattcacatgagccctgcccagccagccgagcgctcagctgtcctcacactaccccagggaccaaggccatgcacagccccagcctgggtccctctgtgaatgcatgtggggtctcaggagcacagaagatggggccatctgatgtccacaaaaggtgagcaatgcgggagcaaccatgggtggtataggttgcggctgtggcccctacgcagcctccagtgtcctgacccctgctgccctcttcacccaggccctggaggcccagtctatcactgtcctccacaaatgaacttacctgtccccaaatccaggatcctgtgtgcttatacctggccactaggttctcctctgtcccagtggctactgctcaggacatctttatccctggtggggcacagagaggggctgtcagagcaaccaagattaatacagacgcataattcagtccttgagcactacccaggactctggcccctcattgctcatcagttcccactttaccccctggcatggatctcactgagcaagccaactctttacacaggagcatccaggtcagaggtgcaggactcccccatctaaagctcatgcaggctcccatggcgatgggacaacctgtctgctcctctccctggcccacagccctatctcgcctgcagctcctccacacacctgggacagcagttctcagcccttccctgagggcccctggaagggtgatgatctcatataggttcacttgaaccaggtgccaccttcccacaagtgagctggtgcctgcactaaagcacagagccacagttcccaagagtgttctgccactgccacaggtcccaagagtgttctgccactgccacaggttgttcgtcctgagatgagaggtaagaaaacaacccgcaatgggttgttttatatcgggatttgcatcaggatttagctctaaatgacccctgatcccacctgcacacagcgtcagatgagacaaggtgaggcctctttagttttctgttgaggctgtgacaaattaccacaagcttagtgacatagaaacctgaaccaaagtgcccacatggctgtgttctttctagaggctccagggaagagtgcatttcctctccttttccacctcctagaggcctcctgcaaccttggctgtgtcctctttctccatcttcaaagccagcagcacagcatcttgaaactattctgtgccctgcttccatccccacatctccacctcctcccacctccctctctcacttaaaaggaaggagccttgtggttattttggacgcacctgggataaaccacaacaacctccccatctcatgatccttcctttaatctgtaaagtgtcctttaccacgtgacatgtccacagatctggggatgaggatgtacacatctttgagaggcccttgttctgtccatcactcctctcaaggccatcttctcatcatcgttcactacaaactacacatgggcacctggatgggttcatcatgactgtggcgtcagttcctgcattaacatccccagcaccctccagatcctgagagagggagacggagggctctccatgcccctagtacctctccaccttcttcttggtgacatgcttagttgctaagaataacagaaagcggaggtgactgaaagatcacaactcaccggcccttcaatagttcgtggacatcagcaccacggacagtgactcagtgaggctaatttccaggtggcagcagggagcatgcagataggagggaactgcaggaaaagctgcccattctattctatatgagaaagagtgtaagaaagaggaagctattacagggataatgctattcttctctaatccataaattgcgaaacctttgcatgtctggatatcatggtttttagcacatctgctgccactccctgcagggctgattgctgcatccaggatgtggtctcttggggggctcacagcctgctttggcctcatggtgagtctccctgcccctgacactcaggccactgtctctgcctacaacatggtgggaaccttccatgattaacgtctgattctctgtgcctgacctttgaagcacatccatcactcagcctggagcatccgctgagctcagcatcctgctcctccatccccagctgagcccttgaggagatgcttgagaggatctcctgggctcctctgtgagctcctccaggctgagccttgtgcttggtgtcagaggcctttgccatctgcttgttctttccataggcaaataatcctcctcagggacaagtggggcctgaagatctgtctgaatatctatctatctatctatctatctatctatctatctatctatctatcatctatctatatgtatgtatatatgagaatgctttattaggcaaaactgcatactatgaacatgctttaaaatgcaacaggatgagatgtgaagacataaagaacaagtgtgtagtgacacatggctatcagaacacactgaagaatccacaccgcggccgagagcagtggctcacgcctgtagtcccagcacttttggaggctgaggcaggcagatcacttgaggacaggtgttcgagaccagcctgaccaacatggtgaaaccccatctctactaaaaatacaaaaaatttagccgggcctggtggctcatgcctgtagtcctggctgttcgggaggctgaggcaggagaattgcctgaacctgggagacacaagttgcagtgagctgagatcgcaccactgcactccagcctgggagatagagtgaggctccatctaaaaacaaaacaaaacaaaaagaatccacactgcttccccgcttcactttacccagaaaaggaatgttctaggccacttcctcttcagcacacatccccagggaactaaaataggttcacagtcacccccatcttcctcattcccatcacctcttacccacagaggcatctctggtcctacagatccagccctgccttcaagaggcacaggtccaacccatccagtgtccctgctagtcacacacagcactcagggtacaatggagggcttctgtgctttggatgggaacaaaccccacctcacattcccacacctgagaagccaccagggtcctctctgtcctgtcctcacactcaatgtctgtcctgggtcacccttgtcatctctcctggaaataggcatggctcctgacaggtaggattgaggctttgtcttttcaggagtccctcccactctgagcacatgaaactgctcagctccatgcaaccctctctcaccaggggccttgttctctgggtccctgaatacctgggtccatgccatgtacattttaagaaaaatgacagtgactctcaccctgacatcctcacccaaggcacgtgtctgacaagaatcaccaggtgagatacctgtggctccacacacctgaggcttcactgcgcaggggtgtcctcatccctctcctcccacccctagggacagtaagcaccacaggctgccttggaccaccagctccccctcccagacacagcctcagatctatactgacatgctacatggagaggctctgatgaacagcaggtattaggaaatcccaccgaaccaggtgccacttgcggccccactcctcctcatatctgtgactgggacagacacacataacacacctctgttcaccgcccagcccccaaggtcaatcacagtctgcttctcccctagatccactgctccccatgtcttccgtcctcagctgcatcctgggtggcctccttgctgttcttgtaccccagaggcaggttccaacctttgtgatgttgcctgcaatgcccaaactttcccttccccttccccttcccttttcccctcccccttcccctccccttcccctccccacccctatcccttcgtcttcccttgtcttcccttcccttccctataaagccaaacatacccatccacctaccttgtggtcaaagtcatcagcctcctgctccactcagtgttctctgaccctgcatatggaggtggtggcccctcctagaacacccaccactcactgtcagccttgcgtggtaatcacagattttgcaggggttacctgtgttcaggtgtgtcacctgtggaaccagaactcttggaaggactggcagagggagctgcttaggatatctcagggctcctggcatctggtctaccacagggctattaacaacagcacttagggacaaggtggaggatggacggttaagagggtaaatatggatgatgtgtgggcaaagaataggacacaggaacacatgcagtactcaaataattatgccaagaaaggtgaggacatggagatggacattcccatatacttctgatgggactgcagtttagtccctacagcaacattgacctcatcatgtttaacgcgcacacgctctgaccactatcctacttctgaaggcctccctgtgctgtgagctctgagaaggccaagcttgcctgttctgtctctgctaaagccagagaccagccaatagcccagcacagggtacttcataaatacatgttgaaggaatgagctccaggaacagtactccacatggtagagatgtgtgtatgaggatgttcactgcagaaggtcatgtcaatgtgacaagtgacgagcagcctcaaatccagcaacaggggtgtgggtaaaagatcatagtgtagccatgcaatggaaccaatgaaaaaaccacaattagagcaaatccacatgtattaataaaggaggtgccctccatacatgctgcacctaacagaatgttgccaaataagaatgaaaaatgatgatatttgggctgtaaaaactagaagtcagctaaataagaatgcatcgaaagtatttgtgaatgcttacaattttataatgccttggcatccgttttggatggaagttggactttctcataccagaagcagggctcagtcacctttgaaatagtttccagttctccacctccttccagttcctcagtgtgattgatcagatatctgatttatacaactgcctcctggtgacctcctccctatgggacttccggatacagcccgtatgactgccccactgaccccacaccctgcctgctgcagtgaccacctctaattacctggatctcatgtctgcttgcattaaatccaccaattaaaactccctgaggacaatctgtttgaataatattctgtaccctaataaaggccttgacccatgggttccccctctgtcctccccatactgcccctgacctctgtgtgtgtgtgtgggtgtgggtgtatgtgtgtgtgtgtgtgtgtgtcctccagacagggcctgtatcccccaggacctgtaagtaataaatctttattttcatcttatgtctctcgcaatcattggcaagagctctgcatcttaaagatcgcaaatttaagaaattggtgtagtcggcacaatagagtacctcttctgtttagcacaagatatctcggagctgctgaggcttttaacatcctcgccggtgtggctgcctcactggtgaggccgttctgttcagtgcaattcagttgctccactgtgtgctgctgtgttgctgctgtagagtgctgccatgttgttctccccaaattgttaccgagtaggaacctgtaatgtgctcccaaggtggtctaccccatgagaagggggattctccatctagggcaagggctaggtgtgtttctggaatcctaatagggaaggcatccacagagggtgaactccactcctccttagagtgaggagtgacatttcccatttattttccccatggaggtgccatgtattgactttttctttcactgtcccaaggttgagccaaggtgagctatggagaccagggcaagataccatttctgttagcaaagcaaatgggtgacaacgtgtggagaagctgtggttctcctgatggatatagcagagtgccatttagtaaaatcttgtcaggaggctgcccctggttagaccggcagtgtctgtagtcactaaggtggatgcgaattttaggccctgggccatggataatccctgcagacacagccgtggcttcatgtgatggggcaatcccgggctagtggctcccttgtttctgcatttcttgctgtggttgcacaatcaacacctcaggggttgattgggtcaccttggaaagagaaacagctgcctaggaggctggtgcacatggaggccaccctcaattttattctgctaacaagttgtaagattaaaacaacagggggctttgggtaccatcaggaacttgtcaagtaaacatccaaagacagaaagaagaaaaagaaaaagacattaaccgtctagaaatacaagccattttaaagattttgcttaaaagatgcgcttgggctgggagcggtggctcacacctgtaatcccagcactttgggaggccaaggtgggtggatcgactgaggtcaggagttcaagaccagcctgaccaacatggtgaaacctcgcctctactaaaaatacaaaaaattagcagggcatggtggcaggtgcctgtaatcccagctacttgggtggagaatcgcttgaacccgggaggcagagacggcagtgagccaagatcgcaccactgtactccagtctgggcgacagagtgagacttcatctcaaaaaaaaaaaaaaaaaaaaaaaaaagacgggcttgtttcgtcgttgtggagtcatcccagagagaggctactccctagagtcactgaccacctttcctcctccatcttttcctcttatcattctagagacagaaaacaagaatctcagctttaggtggctaacctcaccccccaagaaaagaaactaccactttgattgactacaaatccaagaaaaataaaagagaaactttaaaaagtactgagcaaaccacaggtctagcaaacataatgctagccctaggttacttattcatttacaacaaacccctagatataggaggaaaaaataaaaggtaattaaatatatacacatacaatattttaatataaatatataataaatagttaaattatgtatgtataatatgtaactaaatcaaagtaaaatttcatactttgattctattggaaattcaaaattcatttattaacttatatattaaggaatttatgtaaaaaaagatttttaaaagggcaccaatttgcttttgtgtctctacaacataggatctaatttaactttacatttgctaaatacactaattgacaaatattcatggatttaatcaatactggggctcaaattgtagccacacgtgggaatcccataaatttaaacactctgtccctattatcttgagaagaaaactaaatataaaattgaaaaaaacaggtatgtctcaatttacctgtaactttgcctaaatttcccggagtcatatacccattgctgtaaaacattctctattggacataggtgctctgagacaataaataaaatagaagtgtttttggtacttagacattggcttgacaaaatgggatcccatgaaacctcagttaagatagtgaatacggcccaatgtgagttgaaatggggcctttaaggattaaaacttattacatgaaacctagtaagtaatggggtgattatccatactgcttctccatttcatagcccaattttgacagttgtcaaatctggaaaaaacaaacaaacaaacaaaaaaacccctgggaatctgttgcctcacagagacacaaagtagacatcaaaattgtatatctcagttccagttccaaaatggtggcatagaagcaagctggctttactccttcacacagaaaaccaaaaacaaatatacagcaccaaaattattaccagatatattccagaactcaaatatgaaaatgaaacagttttcagagccacagagaagtgaaaaaaactcccgacagatgacaaaagaatcagatttccccatctgtaatgtccctccctgccccattctgcctggtaccaggtgtgtggaaaattttaccccaactcatggtttctacactgggaaatgtaagatcaatgcgggcaaccagtttctgcacaatcctgggttccctgtccctgccttaacccacaagaagcattgtgagtgcccgaagggagaaatttccctgaggacagtcaaagagtggggaggcaggactaccatctccttccctggaaactctgctgtgtaactcagccaagggagacatgaaatcagactggtgtttcagcagctccatgttgtagtaggtttgtttcacaggtatcctgggcatggacatctagccagctttcccacactgccaggatatcccctttgggacctccctcagttaggaagggcacactctgatcatttactagggccaaggtaaaccctaaaggtaacttagagatgaaaaggaggtagtgacctagcagtaaagaactctaagaaaatctatccaataaaaatcaaaacaagccagacaaagactaaaataaataatgaatccttcaatgtaaagacctggacttacatccacaagaaacagtaagcaggtaaccatgatctccccacatggacaaagtgaggaacaagtgactgatcctgatgagatggtgatgtgtgagctctctaatcaagaattcaaaactgcagttttaaggaaactcaatgatcttcaagaaaacatggaaaagcagttcagaaatttatcagagaaatttaacgaagggattgaaataatttaaagaaaacaaacaggaatcttggaattgagaaatatatttgctgaacaggaaaatttattagagtctctcaacagcagaatggatcagaggaaagaatcaacccaaataagactcccccaaggcataaaataatcgaattctcaaaagtcaagggcaaagagaagattttaaaacagaaagagaaaagaagcaaatggcataaagaagctccaattctgtggcaacagattttcagtggaaatcatacagaccaggagggagtgacatgacattctcaaaatgctgaaaaaatattgacatttgagaatactttatccagtgaagttatccttcaatataaaggagagagaaagtttcctagacaaacaaaagctgagataattcacaccatcagactagtcttcctgtaaatactaaagggtaaatactaaatacttcaatgtgaaagtaaaaaaaaaaacactaacatgcaaaacaaccacaacaacaataacaacatttgaaggtataaaatccactggtgaaattaagtacgtagacaaacccagaatactcaaatagtaattgtggaaagtaatccaatcataactctagcatgagtctcaaaatataaatctatcaaaaacaataatacattttaggaggccaaggttggcagattccttgaggtcaagagttcaagaccagcctggtcaaaatggtgaaaccccatctctaccaaaaaatacaaaaatttgcagggtatggtagcacatgcctgtcgtttcagctatttgggaggctgaggcaggagaattgcttgaacccaggaggtggaggttgcagtgagctgagattgcactactgcactccagcctgggtgacagagggagactctgtcttaaaaaaaaatagctacctgtttggagaaaggtaatataaaatatgtaaatagagacaaagtcaaaatttgcaaaggatgaaattaaagagtagagtttttttggggggttttctgtttctattattttatttgtgatctaagataagttgttaccttttcttctcttgaagatactttgttatatctatgtttttggaagtcttatggtaactgcaacgcaaaaaatctatgatagatccactgaaaataaaaaacaatgacttaaaacatactaccagagacaatcaaccacaaggaagacagtaaaaaatgaagaaaggaagaggggagttacaaaacaaccagaaaacaggcaacaaagtggcagtagtaagttcttacttaaaaatattgaacactgaatataaatggactctattctccaattaaaaggcatagagtggctgaatgctgcctatatgctgcctacaagaaaccacttcatgtaaaaagatacaaatagactgaaagtgaagggggtggaaaaagatatttcatgcaagtggaaaccaaaagagagcaggagtagctatactgatatgagataaactacaaatcaaagactataaaaagagacaaagaaagtcactatgtaatgataaagcgctcagttcagcaagaggagatgccaattataaatatctatgcatccaacacttgagctcccaagtctcccaagtatttaaagcaaacaatagtggatctaaaaggagagatagactgaatacaatattaattaggggactttaacaccctgctctcagcaatggccagatctttcagacagaaaatcaacaaggaaacttcaaagttaaactacacactagatcaaataggcctaactggcatttacgggacatttcactaactatctaactgttacagaattcacattattttcatcagcacatagaacattcttcagaacagaccacatcttaagtcccaaaaccagtcagaataaattcaaaaaagtttatatcacatcaagcatttgttctgaccacaatggaataaaactacaataaatgaataactttctggacacatacaacctaccaagatggaagcatgaaaaggcagaaaaacccaacaaaccaacatgaaactgtaacaaaaggaaaacccaggaccgaatgacttcactgctgaattctaccaaacatttaataagaactaaaaccaattctactcaaaatgctttaaaaaattgaagaggatggaacactttcaaactcattctacaaggtcagcattatcctgataccaaaaccagacaaggacaggacaaaaacaaacaaacaaacaaacaaacaaacaaacaaaaaaacactacaggattgcttgaggccaggagtttgagatcagcctgggcaacatagtcagaaccaatctcttaaaaaaaaaaaaaaagaaaaaaattagccaggcatggtggcatgtgcctttagtcctagctactcgggaggctgaggtgagaggaccaattgagcccaggaggttgaggccgcagtgagccatgtttgtgtcactgtactccagcctggggaacagagcaagatgctctctcaaaaacaaaaagcaagctgggtgtggtggctcctgcctgtaatcacagcactttggaaggctgaggtgggagaactgcttaagcccaggagttcaagaccagtctggacaacatagggggactccatctctcaaaaacaaccaaccaaaacaaagccaaaaaagaacataggccaacatcactaacaaacatagatgtaaaagtcctcaataaaatattaacaaaccatgtttagaaacacatcaaaagagatcattcactatgattaagtgagattcatcccagggatgccagtatggctcaacatatgcaaatcaataaatgtgatccatcacattaaagagaaccaagaacaaaaaccatataatcactccagcaagtgcagaaaaggcatttaataaaagaatgggttgagggagtggagcccatagtcagagcagcagtggtctgggattttggaagtagaaagaagggcagcaccactggccaggaccaccagggaacacccccataggccctgggtgttgtgctccagggagggttccctctggagttattaatcttggtgtccactttgcccagctgcccctcacagggtcagggaggatgaagggaaagcttccttctaatgaaagttcagggactcacagttcctagagcctgtagggagaggaagatcttcgaggaagagcacctgggcattggggcgtttgagaggaagatctatgccaggtccaagtggacaacctgtggactctctctccagggacatacgggtatctgggaatctcctgtagcttaaagaggtaaagacctctccctttagcctgaggactggaggatgctggttcaggtgaatgagtcctgcaggggctggtacaggcctggagggtggtggtgtccagggccttgggttcacccttagcatgattcaggccgggcggtgtttcacatgagcaagagggcctgggttcattgcttcaggacaatggtgaaatctcatggtggaagaaatcttgtccttgccagtgcccagctttcatttggtcttggcccagagtgtcctccctagagaagactcttgtcccttcttcacactgcccttcagggatatgccagccttatgggataagatggggtggagactgtagatgtgggtgggaatctctccacagagtgctccttctctcagcggttgcaccttgtctcagggcttcagcttgaaatctgggatctccaagcccttccctccccagtcctggccaggaccacatgggcagatgcattgtgtgaagtgcatttcatttggggtgtcctctctgcatggcaccctcccgttgattctctttgcgcatgtcagagtgcaggcaccatccacacctcctgctggaggagggacggagctgttgactcctgagagctgatcatgtgttcccaccctcacacacaatcatggtccatcctctgagggacatgtgttgccaccactgtggagatggtgcaactgacagtaacaaacagtaaaatctggtactgaatgggaccttaagccaacaatgacaatgtcattccaaggtgtttcatttttattgattcaatgcaagtcacctgatttcattgactattcacaatagctcgataaagtaaatgcatcatcaccaccactttaaagaggaaaaaggtgcttgggcagtttgtgactactgtggtggctgctgcattgctctctggtaaagccaagtaggtggtgggtgcggcctctgggctgggatgatccaccctcctggtggtggcaggggagccaagctggagccatggcctgtgcagtggtagcagctgaactgaccgctgctgcaggatttgcaagctgttacattttgcgaagccatgaagcacataaaacctcaagtagaacaagtgtttcaaagtctaccaaaatctgccttcagagattattactacagaggtggatatgaacccaaaatgacaaaacgggaagcagcattaatactagataatgaatgaacactagtaatagtagggtaagccctactgccaataaagaaaaaaataagagatgctcattaacatgttatgctcttaaatcacgcagacaaaagagggtctccttatatagtagccacaatcaatgaagctaaagatttactgcaagatcaagctaaaaacagtaggtgtataatgaatttttaacttcatattagtttatgtatatgaatatcaagtttttataataaaatgcctccaaacaaagaatatttgatttagggtttaataacttctaagaggggactcagatgtttcctgtttcacagtcagtctgagagggtcatttttcctggagctgacctgggtggaggcctcacactgatactccccagcatcctctctcctgatggggtttatgctgagcatacagtggccctgggacagctccattctctccatgagtcacagacgctggtcatggaagatccactggataaggttccagagtcatctgtggggcaggtcaggatcacaacatccttttcttctgtgactctggtgttgctgactcagatggggtcggagccactgaccctgtggacaatcagtggaggtgctcaactgaaagtgggctgagggcacgtcttctcctccatccctgggtccttaaggtaactgtggaccccagaccaactgacacaggagctagaaagaaattatttaggaagttagtgagggtaagagcgtccttggcaaggtttcccctttaacaaaaagcagcccaagataattccttttctaacaaagagcagcctgaaaaattgagctacagatgtagatgagcaagatggaagcttgcacaggtgaattccagtaggtgtgccaatagaaaagggctgcctggaagccaggtatgttcaacatggagactccatcctcccttttctccattaccacatgtacagtaaaaaaccaggcaacatggcaccggccaggtagacaatccatctgcatgacaaaagatcagagtggggcagccagcaaatggcacagctggtctaaacaatctttcaccccctgtataaatcagacactgcctcctgaagctcatctataaaaccttctgcatttcactatggaagtggcaacccattttccccaggacccctctctctgtgcagagagctcttctctttctttcccctatgaaacttccactcttaacttcactctgggtgcctgcatcctagttttccatggccatgggacaatgaacctcgagtattaccccagatgaatgatgctgtttcacaatcactggttcagctcccttcttcttagggtttcacagctcggtggggagaataccacgcctcagtggtctggggagtgaggaacaaatgaagaattaatcagattttacttagaacgctatcacctgcctcaaccatcagatccatgttgggaatgtccaggcctcctctcttagatctatacccacttcactggacctgaaatcctgtgtttcccgatgtgttggtgtcactcctatgagaggataaaggagagaactttgctttctctccccactcacaccctgcacaagacagggcccaatatgagacacacactcgctcagtagttctctcatgaaggagggagggagtgacctcgagtgattctgccatctgtagtctgtgtaccctggccagtggctgtatcttcatatgcctcagtttcccctcagtaaaataggacacacaatgagaactaaaaataaaattctaattccccagtgaactgaaaggatggcctcttggccaagcggatcccagagttcctgatcatgacaggatgggaggttacacctcattacagcccctccctttggaagtttagaggtgacaactgactagcattaacgctaaaatcgagatcatgagactgacagaacagactctctgtggccataagataccaaattataaactcaacctaaggtcatgcaggcaagggctaagccacactttcctacatttaaagaataagctatgttctaacacagaattttctttctctctagcggctaaagtaacactagccttcgagataagcaatattgaaatgatcgcggctcatccaccaacactggctaactgacccctgttccaacagccacaactacacttcaattggacaggagactgatttcagtaactttctcctaataagagaccactgagcatggcctggttctgctggtatacagacacggtgcactgagtaccataatgcttgtttcatcttttgatgtataagacctaatttaatacatttaaatctgaattctccaccccaaagtgaacatggggtgcatgtagcatgcatgtttgttgatcacgcatgtgcgtgtacttcctttgtgagtatccatagctccacctataacctgttgaatatgtatacctggccaactcattcagcataaatctatcttccacattcccctcccttgaagtgcctgctattggtctctgctggaggctgcatcttctaccctggggaatggccagcctgcaggctgtaaccctgtgtaagaaataacctggttgggtgcagtggctcacacctgtaatcccagtggtttgggaggttgaagtggtagaatagtttgagctcaggagccagagactagcctgggcagcatagcaagatcctgtctcttaaaaaaattttagggaggagagtgaggatcagaaaaaatacctattggctattatgcttagtacttggatcatgaaataatctgtataccaaacccctgattacatatataacaaacctgcatgcgtatctttgaacctaagataaaagtttgttttaaaaactatctgggtgcagtggtgcatgcctatagttccagctactcgagactgaggtgtgaggagtgcttgagctcgggggattgaggctgcagtgaattatggtcccacctgtgagtagccacttcactcaaacctgggagacagagcaagaaccggtctctaaaaaaaaataaaaatagaaaaataaaatgaaaaatatatgaaataaagtctcctttccaaacgtacagatctccgatttttctgccaacaatgataaatggtcagtggcttgccatgttgtctgtgaattacttttaaaatattcacgatcacctgacctaaaggttggtaccaaggaaccgcctgaatacaccgtctctgattatttgcctccaacagagtgttccctgggcctgatctctggtggacaatgagctgctgggaacatcctctcttctctattcctcccctggggatgctgaccttcccttggagtctcctaagttccccagggcagtcggctaatgtcctagggagcttacctgtcttctccataccaagtctcatgtgaaggacgaggctttgcccttgcccagatgaggctctgggggctgagccctggctggctaccagctgcaagagccatggcccttggacagctggtaaatccttgttcccagtcagccctgcccaagatgcctcaacccagccccggcacaggcttcccagggtcacatggagtcaggatcctgggacaggggactggacaggggtttccagggctgagtttctgaacaggggcttcccaggggtcccctcactccaggatctgacatggtcctacaaggaacgtccatggggaggggacccaggagggggaactgacactgacctccccttactgagcctccccccaaccccatcagactgtccttcctctgtagcaagtgcctgcagggtctggatgcaggaaagaaattctgatctgtggaagtttgtctcccctgtgtgtgtcttgcactaaatgtccaaacccccaaatgggatgtaatgtagagggggacacaggcacagcccaggcctgaaaatcctgtgtgtgtgaagcagaactgacccccaacacccagagctcatgagacatcactgtgtacgtgaaactggccagttacttcttcattcacaagatctgtttttatgacttgtagggtgtaggatcctgtgtcattgttggtgacattctgtatcagcagacatgtattggggtatattgtctctcagcctctgtggcaggtcctggggtaattacttgagttcctagtacatatcctgtaattcccctttgtaccagttgtagccaagcctaaggcagattgtgggtgagtggaagaatctccttgccttctgcagcttcaacagtgacttgggcagtggtaggcaagttccagaaagttaaaagtgaggctaggagtggggagagagcatcagttaatactgggccctatgcattgaggtggaaagatggggccctaggtcctggacaggtctcttcatccctcagccttggagtgtgtgtgtgtgtgtgtgtgtgtgtgtgtgtgtgtgtgtgcgcgcgcgcgcgtgcgtgcgtgtcctactgggccaaggtcagcagcatgacctcccttccttcagtgcctctgaccttggcatttccctgtttggagtccttttccccaggggtctgcctggctccctccctactgccttcaggtcctgctcacattagggcatccttgggagaccccttccctgacacctctagagaccctgggtcttccctttctgacctttcgctgctgtgttccctccagggctcttgtcaatacttgacctcacattctagatacccttgcatgtctgtcttcctccctatgagagcatgagctctgtgagaacagggacttgtgtgatcttggttgcaccccagtgcctgggacaggctgcggactcctgtggatgagctcatgagtgttcccagggcccttcacaacgtgggatttattttccaatggctgaggttgttggctaagagctctgttggagttcaatcaggctggtgggaaaaatattagagatagttatagagatagacacaaatcttcttggaagaccaaaaagtttgcataactttggtaatagatctgactgaaggtggtccctttacctttagttaaacaaattaaagtagtaacaaaggaaggcagagtagtttgtctagccagcttgtttactcatgtgatcttaagactaaccattgatgtgccacaggtgcttaattgctttctacttgggaagtccacaatgtcaattaccctctaacggtgttgactcaagcctttgttaattaatcttactgaataaatatgagtctcactagctgatcaaggccatggtcacaactgtttataggactcagcagggagtctgtaagcggccctgacagactcagctggactggcaaagcaaaatatgtgtgtgtcagtgtacactattcacccgtcccccacagctggtgcccctatatgaggagtgctgccacagagctctgtttagtgtcccttgttttttttcttgagtattaccccaacttaaattgtgattattgtcatctgttttcaacattaactgctcagtgatgattcacttggaaaacattaacaatcgagattgtttcttcactaacaacctcagattatttagattttcctgttgtaatcccttcttcctgtttagtgtccaacagaagccctctgtccctctcaggtccccgttctctccaagaaaccccagccagtctctgtgctccctcctcccatccactcccagggagccctcccctcacctgtgagcagaagcgcctgccagggatgtgcactctgtgaggaggggctgagggaggccccatgggctctgctgtctgctttgtcctcctctgtggagaggagcttgggcttcagaaaataaggaggccagaaagtaaggaacaggctgagaaataatggggatgtgtcgaaaggtcacagatgccaacatctttgtcctatgcaatattatccataaaattacaggtttgagatatgcttaaattttcttctaacatgcattaaaataaacatataacttttaatagttatattaaattgtatttaatataaattaaatgctcttgtcagagctactgtgactgtcagctctgctgtccttcctctctctgtgctaagcctcctcccagggcagaagcacttcccagggccaggggtgggggcggggaaaggtaagtggcaatgaggatctgcacaggtagcctttccgcctcctcccctctcagtcctgcctccttgtcttcttttcctctttttctccaatctacatttcagttccttagaccacgctgtgagaagcaaggcttattgggacccccatcccttaacaggatgacctgtgctccccataagtgacctctgctgtgtctagggattggctctgtcagcacctcacagagagtccctggggcccccaaactcagtgttattttctctatgacacagaaacccctctgggtatgcaaggttttcctcatgttttctaatgtctgggaaggttggatttactcccagcagggaggtcacagagatgtccagggagtggggtcctagaaatggacaaatctagagctaaagcccaggtctacgattttcagttgtttttttctgcagtgctatgtgaccctaatttcctaggagtaactaaaatgcaaacctcagacatttgtagacattttatgatttttctctacagcttgtaccactgttattattatttgctttatgctttttcctaaataaatttactttacaaaacatccttgtcctagtagggtgcaggggctcacgtctgtgatctcagctgcttgagaggttgaggtgggtggattgcttgaggacgggaatttgagacaaaacatctttgtcctatgcaatattatccataaaattacaggtttgagatatgcttaaattttcttctaacatgtattaaaataaacatataacttttaatcatcatattaaattgtatttaatataaatttatatacaatacatttttatataataaattatatatataaatgtatatataatagtttttcttttttgagatggagtctggctctgtctcccaggctggagtgcagtggcacgatctcagctcactgcagcctccgccttctgggttcaaacgattctcctacctcagcctcccgagtagctgggattacaggcgcctgccgccacgcccagctaatttttgtacttttttagtagagatggggtttcgccatgttggccaggctggtctcaaacacctgacttcaggtgatatgccgcctcggcctcccaaagtgctgggattacaggcatgagccaccatgcctggcctatatattttatataattatataaagttttctataataaattttatataataatatataaaatggatatttatttaagataaagttattagttttatatatttacatatatttaggaataaatgtgttactgtgggagcccagtgcccaggcaggtagtcagtacatgatggttgtcattagggttaatactttggaattctggattttttcccaagagagtgtctacgctggaatattgggcttgtggctttctgctgatgtgcatgtgtgaagaagctacttccacttattaggacttgtgtatctgtctcgcagtttcactacctattttctcgtgatgttggtcaagtcgcctaacttttctgtgcctcatttacctaatttgtagaatatgggtaacagtacacaagtgtgagtgtgtatttcccaggactgaccactagagggcgtgaaggcaccggcacttactattacagcaatgggtgtagtagtgctcatggtcgtaaacatcattctcccatgaaaggaaccagggcttcctgggagaaataactgattccagggctggggccggaaagcacaagcggagcctggagcatctcgtgaggccagaaagtaaggagccggctgaaaaataatggagatctgtcgaaaggtcacagatgccaaccagaaggagctttgaatgaccaattttgagacaaaatgagcactataagaaataatgatagtaataaattccaacccataaatacccatgagttcctactaatataaataaataattgaatacataaatatataaggatgaagaaacagctttttcttacagcagaattccaattaatgaatgtagaaggaatgatcaaatagaaaatcactatttggctaacagcacagtcaattgtttgtaggcaagaattatcaatggactttaaatatgaatgggtaaaagtatgatgatgctacaactagtgagtaccaagggggaaaaaaaagtacgttgagaagaaacaggctacttccatattcccaaagtatcacttcaggagctacttattgattataatgggacaaatagtaacttacagtagagaaacctggcaacagagtctctccgaggtacaaaggctctcttcaggaaggaggtaaggggaaggaagaagaaaacactgtcctgcctcaattatttgctttccccattctcaagtgtacttcatagacattcaaagatatgtgttgatagtgtccacgatccacatggctctattatagtcatttattcacacatacattcagtgaggctttgagtgcctaatgtgtgcctgatatttgctagatggtggatgctgagaagatcaggtgtgctgctgtctctagggtgactgaatccacctgccccactttacagatgtggaaattaaagtgaaaaggatttataggattagttcactgtcacaaggtcactagccttaaagttacaggagtaaagcaagtttcctgacttgctagattttctgctgcaggtgctgacaatggtgagctccaataggagagaggacactcagagtgaagtgggagccctgaacaccctggattagccaagaggacatgccgggtccagctgtgaccgcacaaaggaccattggggatatttgtattctctttttcacttagagcttgaaatgaggaaaactaagtgcagaaaaccaagagtggaagatttttcacaaagcactggtaacatgcatcagaaaaccctgtgctgatgtctgtcacggtgtttctcactgaacggtaatagtctggctttgagtgtgttccctctacagcctggagttctgcgaggcagggaccaggtgtgattcatctttgtctctccagtgacagtacacagcaggctctgataaatatttcttacaaaataaaatggaataaaaagtagacatctgcacaggtgtgggatgactgagcagcagcagaagcaggaaaagtcagcgtccccagatcagctgatgtggtgttcggattctagataggggtgaggtgccaggatggggatgggggtcctgtggctctgctgccctgggggacacccctaggtttcacagtgcctgctgtggttgctgcactttgcttccccatgggaaagtgatcagagggtgtggggcttcaggtgaccccatgtgggaaatggccaagggaaggtggggtgggcggcacatggttttttttaaccaatatttgaaggtaggttgtatgaaaaggtgttaggcttatttcagcttatggggagtaggacagggattggtgagtgtgtatcaggtatattttggctcaggatggaaaagaactgtcacagtaacataaggtcttttgggaaattacatgtttactggcagagttcaggccagggctgggtgtctgaaaatacctgtcagggtcacttttatggttacaagggcagagcttggcttggaaccaggtttcttactaataccacatattaagtattataaaaactgtcctttgcaataggacattgctctatgatgcaggttgaggtccctctgtttaagtaattgtgggtggctgtgattctctcatctagtctgcgacttggacttcacctccatctgcagtccctctcctttgctgttgacactggtcagagttaagcgcatttactgacgatggtcacagggtggcagcactgcctctctggtattttctaaaacctcttcctggaactgagccagtctaagaggatgtcatgactaagaaaagggcactaatgaggtgaacagataattttttttttcttgtttctcctgtgaagtaacagagtggaggtgagcatggaataattgccttttagaaatggaagacaatggagagaagtgtttcgcaaaccttaatgtgttcacagatcccacacagatctttttattcaatacagattctgatttttctggtgaggcctgagattgtgcatgtctaaggagcttttggatgatgccattgctgctggttggcggaccacactttgagtagcaaggctcgaagatcatttagaggttaattctcactgcatctaatttatggatgaaaacaaaccaaggtccagagagagcatatacagcttgcctaacaaagccattccctaagtgcctgacttcttgcatttaaacccagggcttcagcctttgtccagttctcactccacacatcacacggtttgttcactgttgtgaacgacagttgtggcagcatctctttagtttaggaatccagagccccaatttcactaccctctttggtcttggctcatgctgtgacttcgaatagttttgcccttacttaaaatcttcagtggctcttttgtaatcacaagatcaagttcgaatatctctgtctagtgttcatggctttataacatatggtatctctttagtaaccttacctaacttccctgttttaaaattgtctcttgctgccatagccctccttgctccttcctgctccctaacaaactgtgttcacttctctctcagtggtagtgatgatggcatggcctctgatgttagactcatgtaacttctaatcccagatccaccaccaacattggcaagttgattcatctttctgaggataagcatcctcctctgaaataaacttagatggcggttgagaggggtaaataaaataacacacaaacccactctcatccctgagaccctcttcaaaactagcatataaaaatagctatttgaagaggttcagtgaaattcaaggtaacacagagaaggaattcagaatcctatcagataaatttaatagactgaaataatttttaaaaatcaggcagaaattctgtagctgaaaaattcaattgacaaaccgaagaatgcactaaatctttcaacagcagaattgatcaagcagaagaaagaatttgtgagcttgaagagataatatatgaaaactcagagtcagagagacaaaagaaaaaagaattaaaagaataatgcatgcctacaaggtttgattattaagctactcaaagagatacaagagaagggtgaaaaccaacataaagaaatgtaaaaaacaatcagaatataaatgaaaaattttctaaaatgctagctagtttttttttgagacaggctcttactctcatcacccatgctggagtgaagtggcacagtcatggctcactgcaggctcaacttcctgggctcagatgattctcccacattagccttccaagtagctaggactaaaggcgtgtgccaccaggccaggctaattttttgtatttttagtagagatggggttttgccatcttacccagggctggtcttgaactcctgggctcaagtgatccaggagattcactgccaaaaaggatataaccaagtcatatagtcataggttatctaaagtcaatgtgaaggcaagaattctaagagcagtgagacaaaagcatcaattaacttataaaggaaaacctatcagtctaacaccagatttctcatcagaaaccttacaaaccagaaggtattggggtcctaatcttttggcttcttaaacagaatagctctcagccaagaatcttgtgtagagtgaaattatatttcaaaatgaaagagagaaatacagtctttttcaggcaagcaaatgcttcaggatttgtcacggctagaccatcctacatggaatgttaaagggacttctaaatcacaaaacaaaagatttaaatagaacagaatagaacctcttgaaaccaaaaaattcaaatggcctataaaacaataacacaataagaaaacaaagtagataacgatcaacatgatgactggaacaaatattaacattgaatgtaaatgacctaacactccacttaaaagacacagattggcaagataaataaaaaatcacaaaccaaatatcagctgtcttcaagagactcacttaacatgtaaggattcttatagactcaaggtaaagagatgataaaagatattccatgcaaatggaaaccataagtgagaaggaatagctatccttatatcatataaaacagactttaagcaacaacagtaagaaaaagacaaataaggcaactatataatgataaaaggatcaatcaaacaagaagatattacaatcctaaatatatatgcacctaactttggagctcccacattcataaaacggttatgatgagacctaagaaaaaagatcaacacaaaacagtgagggtgtcctgggttttctttttattggacagcagtgtactagcctatcactttcccagtcaggggatttttggtctccccattcccctaccatgggttcatgccaaagtccatattttttattagtgtttggaattggattttttttttttgaggtggagtctcgctctgttgcctaggctggagtgtagtggcacgatctcggctcactaacctctgcctcctgggttcaagcaattcttctgcctcagcctcctgagtacctgggactacaggtgcatgccaccacacccagctaatttttgtatttttagtagaaacgagatttcaccatattgtccaggcttgtatagaactcctgacctcatgtgacagggaaacaggcactcagtgaacttcatgcgattgaggagttaatgataatgagagaagggctgtgaggggacagcactggggacaccagagcctgtgacgggctgagttgctgtgccttgggagatgcccttttgactgagccctgggaaggagggggtgtgggggcaggagctgcctgcagagggagtggcctcaggtgggcggccacctggctgcagggaagaggtgacagagttcgtgtgcagagcttggagggtgaggaggaggtgggttgaggtgaccttggtgagggtgaaccatggggggctgtgggccctgctgagggaggccagccagccctggacctacagggtggtttggtcttttttgtcccattcccagcatccactgagtggtgaaactctgcaggccagggaccatcccactggccagaaggagcgcacagtaggtgcccactcagtgcatgttgggctggacagaacctcactctgccccctgcccccagctttgggagctgcagcaaggtccctccccctagggatctccatgcctctgtctctgaggggtgagatggggagacttcaaagggccatctcagagtgtgggggatagagacgcagaagtgtgggggatagagggaggcctgggctctagacccaaaggaccttacacacctcctgagtcttttcaaatggtttcttctgttactttaaaaatgatgtaagtcatcatatttattgtaaatcccaggaatctaatcatgcgtaaaataaggtgtcttatccttgaccccaccccttccccaattaaatttccaggatgttaccactgtttgcagttggtgtgaatctctctttaataatactctgtttatctcacttgtcgttttacgccaaaatacccattgaattatattattgctgaagaccattcttttttttttttttttttttgagatggattcttgctctgttgcccaggctggagtgcaatggtgtgatctcggctcactgcaacctctgcctcctgggttcaagtgattctcctgcctcagcctcctgagtttctgggattacaggtgcacaccaccacacctggctaatttttgtatttttagtaaagacagggtttcaccatgttggtcaggctggtctcgaactcctgacctcatgatccaccctccttggcctcccaaaatgctgggattacaggcatgagccaccacacctgcccagaccattctgttctactgaatcatgtgtggtgggcacctcttatatcaatacatatggattttatcttgtgtttgttattggctcccctttttctcattgcatggctacactcaatgctttgtccacacccctgttcctgggttggaatcttgtgacagaaaatgaagtaacaaaggctaaagctttctaaagtggagtcaggagattgcaagacaattgcactttcaccagcaagagctcaaaccacagaatgttccaatagatttggataaacagctgaagtcagtattcaccagccttcaacatctcaactaggagaaccctaaaattaactaagcacatagaatggaatggacttgtgatttaggattccttctcagccaatgagctgcttctgaaaacaactttttgtggaaattacctgtaaagaaaaccctctcctgtgcttgtcttacagaacactagtcagggctgccctgattcagtggacccgaattgctattatttgtttcctaaacatatggtattttctgtgaccttcatctcaatcttttttttaagttactgggctgtttcccagttttcataatgacgagacattctgcagtgtttcatacacatgtcttttccccatgtggagtattgatccaggagctcattcagtcaacgcatgtttatgaagcatcctgtgccaggctgtgggctggtcactgtcttcagcagagagaggacaggcacagtcttgccttcacagagctcacagctcagggaggctcttagaagtgggatactggtcggagcatgtgcacattaaacatgatgaggtcaaggttgctatagggactaaaccacagtcccaccaagatcgcattgagttcctgtggtagaccagaggtcagggcccctaagatgtcctgagcagctccctctgctcagaagttttggttccacaggtgacacacctgagcacaggtgacccctgcagaacctgtgattaccacccaaagccaagagtgagtggtgggtgttctaggaggaaccgtcacctccatgggcagggttggggaagactgaggggagcaggtggctgatgactttggccagaaggtagggggatgggcaggtgtgcgctcatagggaagggaagagaagggagggcattgcaggcaacaacacaaaggttggaacctgccttcatggactgagaaaagcagggagtccacccaggctgcagctggggagggaagacatggggagcagtgggtctaggggagaagcagactgcgattgaccttggggactgggcagtgagcagaggtgtgttatgtgtgtctgtccccatcatagatatgaggaggggtgaggccgcgggtggcacctgggtcggtgggatttcatagtgcctgctgttccctagagcctctctgtatagagggtcagaatagatctgaggctgtggtctgggggaaggggctggtggtgcttaccatctctaggggtgggaggagagggatgaggatgcccctgagcagtgaagcctcaaggtgtgtggagccacagttgtctctcattagacatgtgttttgcgtgaggatgccagggcctggtggttattactgttgtcaagtttgcatgacaaggacccaggtatccagggatccagagcacagggcccctggtgaggggatgaggctcagatggggctgaccaggttcatgtggtcagagtgggagggactgatggagagacagagcctcaacccctcctgtcaggagctgtggctatgtccaggagagatgacaaggatgacccaggacattgagtgagtcattgagacattgaaggtgaggacagggcagagaggaccctggtgactgctgaaatgtaggatgtgaggagggctctgacccatgcaagttacaggacctccccacccccgagcccacagatgacccttaaattgggcatcctgagtgctgtgtgtgcccagcagggacactggataggctggacctgagtctctgtaagggcagcgctggtctgtaggaccagagtcttctctgtgggtgtgacgtgggcaggaattagcaagatgggggtgacaaggcttggcttggaggatctggtacagaagcccatgggcttggtcagctcagcttctcaggggctcagctggggctggaggagcaggatgctgtgctcagggcatgctccaggcagcgtgatgtgtgtggttccagggtcaggcacgggggtcaaaaattaaccatgaaaagttcccaccttctgtaggcagagaaaatggcctgattgtcagggtcagggagacttaccatgtggccaaagcaggctctcagcctcccagagaccacaccctgggtgcagcactcagctctgcagggtatggcaatagatgtgccaagaaccccaacatccagatgcatgcaaaaattttgcgatatataaaatagagcagatcaagtttccctgcaataacgttgttcctggttgtgtctttttcttgtaaactagacatggacatctttccagcagtctgttctcatctgccaccttcctgctgcagcacctcagaatgaacattcctgagacactgtccgtggtgctgacgaccaagagctatggaacagagtgtgatgtagaatcttctagttacctctgctctcctttcacttttaacaacagagcatcattaacaatgagaaggtggagaggtgttcaggatcttgaagtgacttctgtcttgctctcccataaccctgaagctgctgtagacattattgcagaaactgacaccacagtcaggatggccttgtccaggagcccatgtgcagtttgtagtgagcaaggatgagaaaatggtcttgaaaggggtgatggacagaacaggggcttttcaaaaatgtcacatcatcacccccagcatccgtgaatctgtcacatggtaagagaccttacagattaaatgaaggattatgagtttggaagattattgtagtttatccagatgggtccaacataatcacagaatcccttccttacaaatgagagagggaggtgggagagtcagagaaggaggaggagatgtggggatagatgcagaagacagagcggtgtcaagatgctgcactgctggctttgaagatggagaaagaggacacagccaaggatgcaggaggcctctaggaggtggaaaaggagaggaaacgcactctgccctggagcctccagaaagaacgcagccatgtgggcaccttggttcaagtttctgtgtcacttagcttgtgggaatttgtcacagcctcaacaggaacctacagaggagtcaccttgtgtgcaggtgggatccagggtcatttacagctaaatcctgatgtaaatattgcaggttgcttttcctacttcctatctcatggccaacaaccctggacaatggcagaacacccttggaaaccacggctctgtgctttagtggagggaccagcttgtttgtgggaaggtagcacctggtccaagtgaacctacatgagatcgttactctccccagggccctcagggaagggctgagaacagctggcccaggtgtgtggaggagctgcaggtgaggcagggctggaggggcctgtgggtccaggtagaggggcagacaggttgtcccatcgccatgggagcctgcacgagctttaggttggggaaccctgctcctctgacctggacgctcctgtgtggagaggaggcttgctcagtgagatccacgccagggggtaaattgggaactgatgggaaatgaggggctagagtcctgggtagtgcctgggaggaccttgctcaaggactgaattcttggtctgttcccaccttggttactctgacaacccctctctgtgtcccacggggataaagatctcctgagcagtggccattgggacagaggagaacctggtggccagagctaagcatccaggatcctggatttggggacaggcaagctcattgctgggggacagtgatagatacggcctccagggcctgggtgaagagagcaggagggctcaggacactggaggctgtgtggaggtcacacccacgatctgtaccacccatggatgctcctgcattgctcacctttgtgtggacatcagatggccccaacttttgcactcctgagacatctcatgcattcacagagggacccaggctggggctgtgcatggccttggtctctagggtagtgtgaggacagctgagcactcagctggctgggcaggactcctgcgaatcctgccctttcctgtgtagggtccaccccagcctgactcctaaccccctactcctgtctttccagggaagagagactggggttgagataaggtggagatatttttcctgtgtgacccaggagagaatggacatggagtttcaggtgagtttctgctaagttcccatgagcagaaaaagagccaatgagaggaagtttcccctttattcagatcctttccaggtgaccccgggtgggccataggcccattcactttccctgcaagcccccgcttcctgtggtgatgggaagccttcgccttggcccacccagagcccggggcagtctgttgaggtctctatatattcagcagggacccccatcccttcctgtccccaggcctgtgtctcctcaggactcagagctggttctctggctcaggctccatgtccttccccatccccagggctgggggcttcagggacgctccatcaacccacaggagcagctcccagaggaacctaagaagccacatctgctttgtggtcgatccagcagtaaatgtttgtgtcagagtgtagcaattccagtaaaaacagagaagaggtcttgacccctgaggccttctcagaacagggtctggcatctctctctgggcccacccagggctactctgggactgaacctggctgtgctcagggggttcctgctcccaggcccctccctcctctgctcaccacctcctgttattttcactgcagtttcctgaacttcagctcagccagatgccagtggggacagatcctgggtctccctggggcccaagggaccagaatatctgtggcccccactcacctcatagatgagagcagctgccctggtgctgggtaggggaatctgggcaggggagagaggggtgtcaggggacagggaaggattcctgctgtgtaggaattccagggctctcctcaggtgatggagggtcccagggtggggttagcacagggagtggatgatcctggccctgaacagaggcccagctcatggccagggcaggtctaaccttatccaagtcattctgggtagggtgggtttgtgctggggattgacagtccccctgccctgagcctgcacagctggggccccagtggaaatgggattgggaacggacagtcttacctaggagatggagctgtcagagggtccatggcctggggacagagacaaaagtgagcacgagagtgttaggatagctgggcccctcctgcaagagtgtgtgggggtcctcagttcttagagaattggggagagggagcctttctcaggttattttaggggtcaagtaagcaagtgaggttgaggaagtgacccatgacccagagcccggaggttagggctgacccggccagttggggtttcctgtgtgatgttttatgggatcctctttgcagccccagggatagggtcagaggcccctgggtgtaactggcaggagtggacaacttggggctggcttagtagttcccagccacacccagactgaagggacactcaccgggggtggaggctgggggctgctgctccctgaagtcactctgatcgctggccctaggaaaggtcagggttatttgtgaaggtgcaaggttaaaagtcacaaattggagttaaaataggggaccaggaaaggagcctatttccaagaggggtatggagacctcctttctttatggagttctgtggtaggaggggcccaggtgaggggagttgaggaaaggccttacaaagccacatctgtcctggccagaggggaaggactctcaggcagatgctgggccaggagaacattgatccagtgacacaggaaagggactgaggacccagggaaggaatcagaccaccaggggttgcctgagaggaagggtcaaggcaccagggggaaagcagggccaggcacatgtgcaggacactgaggggactgcatgcatcttggattctcctggaactcagtgtccctgctgtgaccagacactccactcagggctggagatgctgaaatgggacaatgatcttgtcttctgtctctgccctttggcaagagacataaacgacattccaggatatgccatattggggccccggttctcccttctcacagctcagtgtctgcagttaccatgtcagtcaaaggggtgctgaccccacccagcccgtccaggctgttccagtctccactatgtgataatgcccaggatcccccctcagatgccctctcactgggtggatggattcagtgaacagggggaggtaccaggtattgagcaccgctcccccctgctccaggcagctgtggctttgctgtgctaggaaactaggaccatgctcaggggcatggccttaattggactgaattcactgaggacaaagctgttgaggaagcagcccagggtcagcagctggtgaggaaggtgccatggaatgagagggaaggatccctggggagtcgggaggctggggagagcctggcactgaatacaagacagggtctccttccttctcgcctggggtcagcgtgaaggatgggagcagaatggggaaaagctgtggtacctgccagtttttcggaggagcaggaaacacacaagtgcagccaccagaagactcccaaccaggaccccgatcaggatgcctagagtgttgtcatctgctgaaagaagaaggcaaaggggatgaggtccaaatctgttccagggggaaccatgaggggccttgcagggcaggggcatggtcagggaggaaggaaatgccatggagcctgagtgtggtctgttgtgctgtcctcatagctggctcccttgctctccgtggttgcaccattttctgtgtcttaggcttgaattactgggatgcatcaactcctacattctcccacaggaagcctgcacctcatcctgctcctgtgttttttagtccctccttcctctcacatcactcctcttccccctgtttctttttttccatcccatggcagtcgtaaagggcaggcccttgctgccaactcaatgctgatgagcagggatgatgttcattgactgttttcaggggccttccacatggaaggcacagtgggaatcaatctacctgcagcttttctcaccctcccattgccttgagggagaagggtatgtgatattgtgaaatacgtatttggtgttcatcaccattgatatggttaggctctgtatccccacccaaatctcaccttgaattgtaataatccccatgtgttatgggagggaccttgtgggaggtaattgaatcatgagggtgggttttttccatcctgttcttgtgatagtgaataagtctcaggagatcagatggtttcataaagggaagcttccctacacatgtcctcttgcctgctgccatgtaagacatgcctttcaccttccatcatgattgtgagacctctccagccatgtggaattgtgaatcaattaaacctctttcttcatacattaccaagtctcaggtatgtcttcattagcagtgtgagaatggactaatacagtaaattggtaccagctagtggagtgctgctataaagatacctgaaaatgtggaagtgactttggaactgggtaacaggcagaggttggaacagtttggagggctcagaagaagacacaggaaaaaagtttgaaacttcctagagacttgttgaatggttttgattaaaacgctgatagtgatatggacaataaagtccaagctgaggtggtctcagacagagatgaggaacttcttgggaactggaacaaaggtgactcttgttatactctagaaaagagattggtggtattttgcccctgccctagagatctgcagaactttgaacttgagggaaatgatttagggcaactggtggaaaaaaaattctaagcagcaaagtgttcaagatgtgacttgggtactgttaaaaacactcagttttatgtatttacaaaggtatggtttggaattggaacttatgtttaaaagggaagcagagcataaaagtttggaaaatttgcagcctgatgatgcaatagaaaagaaaaatccattttctgaggagaaattcaagccagctgcagaaatgtgcataaacaatgaagagcaaaatgttaatccccaagacaatggcaaaaatgtctccagggcatgtcagagaccttcctggaagccccttccatcacaggactggaggcctaggaggaaaaaatgtttcctgggccaggcccagggctcccctgctgtgtgcggcctagagacttggtgccctgcatcccagccactccagccatggctaaagagggccaaggtacagctggggccatggcttcagagggtgcaagccccaaaccttggcagcttccatgtggtgttgagcctgcaggtgcacagaagtcaaggattgaggtttgggaaccttcgcctagatttcagaggatgtatgaaaatgcttggatgtccaggtgaaagtttgctgcagaagcagagccctcatggagaacctctgctagggaagtgttgaagggaaatgtggggttggaaccccgacacagagtccctactggggcactgcctaatggagctgtgagaagaagaccacaatcctccagaccccagaatggtagatccactaacagcttgcaccatgcacctagaaaagctgcagacactcaacgccagcctatgaaagcagccaggagtggggctgtaccctgcaaagccacaggggtggagcccaaggctatgggagttcagctcttgcatcagtgtgacctggatgtgagacatggatacaaaggagatcatttcagagcattaagatttggctgccctgctggattttgggcttgcatggggcctgtagcccctttgttttggccagtttctcccatttggaatgggtgtatttacccagtgcctgtacacccattatatctaggaagtaactaagcttgcttttgattttacaggcttataggtggaagggacttgccttgtctcagatgaaactttggacttggacttttgggttaatgctggaatgagttaagactttggggaactgttggaaggcatgattagttttgaaatgtgaggacatgagatttgggaggggtcgggtggaatgacatggtttggctcttcttcacccaaatatcaccttgaattttaataatccccacgtgttgggggaaggacccagtgggaggtaactgaatcatgggggtggattcttcccatgctgttctcatgatagtgaataagtctcacaagatctgatggttttagaaaggggagttcctctacacatgccctcttgcctgccgccatgtaagacatgccttttgccttctgccatgatttcaaggcctccccagctatgtggaactgtaagtcaattaaacctcatttttaaaaaaattacccagtctcaggtatgtctttatcagcagccaagaccagctcggtcgcggagatcctaacccagcagtgctagaggaattaaagacacacatagaaatatagaggtgtgaagtgggaaatcagggttctcacaggcttcagagctgagagccccaaacagagatttacccacatatttaataacagcaaaccagtcattagcattgtttctatagatattaaattaactaaaagtatcccttatgggaaaccaagggatgggccgaattaaaggaataggttgggctagttaactgcaacaggaacacgcccttaagatgcagattgctcatgctattgtttgtggcttaagaacgcctttaagcggttttccaccctgggtgggacaggtattccttgccctcattcctgtaaacccataaccttccagcttgggcattagggccattatgaacatgttacagtgctgcagagattttgtttatgaccagttttggggccagtttatggccagattttggggggcttgctcccaacagactaatacacccattttctggtatgtgactctaaagtccttagaatcttcaaagtgatgtctttttcaagctaataattgactgatgactggcagcccctaggcaacttcagaatgaggctggtcactgacccaggtaggattagagggttgggactttcagcctcacccctaatccctggggagggacctggagtttgaattaatcaccaatgaccaatgaatcaattaatggccaatgattgaatcaattaatggccaatgattaaatcaatcatatctatgtcatgaaccccaaaaggactgggtttgaagagctgaacccatggaagtttctggagtgtggtgcatctggggagggcatggaagctccacaccccttcccacatgccatgctctgtgcatctcttcatctgcatcctttgtaaagtcctttattacaaaccggtaagcctaagtatgtgtttccctgagtcctgagagctgtttgagcaaactaatccaacccaaacagggagtcatggaaacctcaatgtgaagccagtcataagaagctctggaggcccagacttgtgactggtgggaaggtggtggcaattttgtgggactgagccctctgctgatatgtccaggtagatagtgtcaggatggaattggaggacacctagctgatgtacggtgcagaactgattggctgctgggtgtgtgggagaaacccccccgcatcacatttggtcacagaagtgtgtctgtgttgatgattgttattgtggagtgagagcagaggaaaaacacagtttgagtttttccaaacagggtggaatcccatctgccaatttagaatctgaaacttatagtttcagtacttcaattaagattgaagtacttcaattcagtacttcaattaagattcagtacttcaattaagattcagtacttcaattaagattacagaactggtaagtgaaagtgatacaacaaaaatgtaaccaaagtctgctcaacttaacagctaataacaacaaagttcataaaaataataccagtcgatattgatagcactgattgagccctggctctgtgcatgaccttgttaagggctttaatcgcattaatctctgaataaatatcctcacaaccaccctgagatccaggtgtttgtaacaattctacagatgaggaaactgaggcccaggaggttgagtgtcttgcccaaggtcaaatacctggtacctattgtaaccaggatgataactggatgagtctaatccctgagttcttacccacattgctccccaggctctgaaggaatctcatccttctcattccgtgtatcattttacaccccccctccctcctaggaaaatatacaaggaaaggagtgagaggggccgagggtcactcacattttacagtcagcttgagggggtcgctcctgttggagctgactgggttggagacctcacactgatactccccagcgtcctcctgcctgatggggtctatggtgagcatatggttaaaccaggacagcttcatcctcttcgtgacctgcagacgctggttgttgaaaatccactggaaagaggttccagtgttatttgtgtggcaggtcaggaccacggagcccttctctgtgactgtggtgctgctggcttggatggagggctgagccactgactctgtggatagagtgaccaacagaaagtgtcttggggccatgctgcatcctcagagatctcagagtcaaatttagaacattctcctgtgaataaaggagaaagatgaaggacagggaggagcagagagaaccagagacacccatagcagcgagcagtagggactacagtgacctcagagaccccagggaccaggaggacccagctgcctcagaccaggaccagggagccctgaaaaccctcccacagatgagcggccccagagtcacatgagatgcaatacctggggtggctttaggagcaggcagtcagagaaatggaacatgggtctcagcccctaagggacaaggaagaggtgtggccagctcctcctaggatcctacatccaggacccagtctgtaaagaggttatgattattcctttcttttttcattaattccctccctccttcatcagagaactactgagtgtgtgtctcagttgggccttgtgcaggtacagggtgtagtgggaagagaaagctgagtcctttccttcatcctcccatgggagtgacatcaacaaatcaagaaattcatgatttcacgtccagtgagggaagaaatgtggatctgatgggagaggcttggacaatcctggcattgagtctgatagttgagacaggtgatttcgttctaagtaaaaactgactaattctccatttgcccgtcattcctcagaccagaatctccctctctgagctgaggatgcccaagaagaaaggagctgaaccaacatctggtcctggggtccacagatgccccacggtggtggccacgaccagattctgggctgcagacacacggtggtgtgacgttgagcactgacagcctgtgtgatgctgatgcaatttctctttaataaaatggggtaaatgtcaatggtccctggcttgccatcctctctgtaaattaacattaaaatatttacaattacctgacctaaagcttggcacagaatagctccaaataaacatcatctattattattttactccaaaaaaaaaaaaaaaagagttctctgggcctgattcctggtggagaaggagcggtccagagtgtcttttctctgctttccctcctcctgaggacagtgcacttcccgggacatcttttaagtttcccatccagtttaatggcctgggaagtttgtttgtctgtcctctccactctgactctcaggtgaaagatgaggctctgcccttgcccagatggggctctgggggctgagccctgcctggtgaccagctctaggaaccacggccctgggacagctggtaaatcgttgctcacaatcagccctgcccaggaagccacaacccagccctggcacaggctccccagggtcatctggagtcaggatcttgggacaggggcctggggcaggggcttgaagggctgagcttctctcagaggatcctcaggccaggccctgactgagtcctataagatctttctcaggtcatgtctatgaggaggaggccaagcggggttggactgagactgattttcccccgctgcatctcccgcatcagactatccttcttgctgtagggaatttccacggagtccggataagggaaaggaattctgatctgttatagtttgtctcccctgggtgtgtcctgcactaaatgcccaaaccccaacatgggacgtaatgcagagggggatgcaggcacagcccaggcctgacaatcctgcgtatgtgaagcagaactgacccccaacacccagaggcacggaggaatcactcaccgtatacacggagatggtgagatgcctgttcaatctgagaatttctgtatgtgacttgtagggtgtagtatcccgtgtcctctagggtgacgttctggaaatgcagatctccactgggtgatattgtctctcgaccgctgtatgcaggccctggagtcctaacgtgagtgtctattacatatgctgcgattagctggttgggctccaccgttttccctttgtaccagccatagctgtaaagattctcgggcagataaaccacagagagatgaacattctccccttcagcaacttcaaagggcgctgatgcaataaagagccaggcagtggtgggtgcgttccagaaagttaaaagtgaggctaggaaagggagagaatatcagtcaatatttgacctatgcattggcatggaaagacggggtcctgggtgcaggtctcttcacccctcagccttagagggtgtgtgtgtgtgtgtgtgtcctactgggtcaaagtcagcagcatgaccctcattccttcagtacctctgaccttggcatttccttgtgtgaaccctctttcccaggggtctgcatggttccctccccactgccttcagttcctactcacacaagggaatccctgggagacttctttcgtgaagcctcctctagagaccctgggtcttccctttctgacctttcccagctctgttccctccagggctcttgtcagcacctgacctcacattctagatctctttgggtgtctgtcttcccccccatgagattgtgagctctgtgagggcatggacttgagtgatgttagttgcaccccagtgcctgggacaggctgcagactcctgtggatgagttcatgagcgttcccagggccttccatatcctggggtttatttgctaatgtctgaggttggcagatgaagacagagtttcatgccctggtggtgtttttatttaaattgtcactgtgatatagttttactatcattttcaaaatgtagtggccactgacaatgaacttgaaaacatggaccaactgagattgttttgccccttggcaattccagttcacttagattttttggttctccttagacgctctctcccctgagtctctaacaaaagccctctgtctcctctcagagccccatcctccccaggagaccccagccagtctctgtgctccctcctcccacccactcccagggagtcctcccctcacctgtgagcaagagcccctgccaggggatgcattctctgtggggacaagctgaggggggccccatggtctctgctgcctgctctgtcctcctctgtggagaggagcttgggctccaggaacgctctagacagggttactgtgactgttgtctctgctgtccttccttcctctatgctgagcttcctctcaggcaggagcacttcccgtttatgggcaagggcggggctctgcctacaatgtctctctgtcccctcccctctcagtcctgcctcccttgtccctcctttctccttcctttttgcctatatttggttccctaggcaaaactttgagaagcaacgctgatggggtcctcataacaggacgacccactctccccagtactgacctctgctgtgttctggccttggttctgtcacagccggtagattatttccctttgtgacacacaaaaccagctgggccctgggtctcctcatgctctccagtgctccaggaaggcagaatgatgcccagcaggaaagtgacagaggtggctctgggggctagaaaggggctcactgggtgatggctgggaaggacccacccgctatcttcagtgtcaccagcctggcctctgacccagggacagagacccaggcctggaggtctcgggaggatccccagctcctaggtgtggagggaggtgtcctgtgtgtcctgggaagagaggactttgatggaaggaggtgggaggctctgggttctgctgtccttggtgaaggtttcagggggaccctctccatgtctggggtctgtgcccccagcttaactctcattctctttgcaaatacatatattttgtggatctgcagttgcctgaactgtctcatgtccctaaatctttgtatccctttttacagaaggtcaggaagggtgtgtacatgagtatgaggactatctgatcagggcgagtgtttgtttcccaaagatctctttagatatggtataatacataagataaatgtactgaattagcaattttaagtgtagaattaaatgatactaattctattcacaatgttgtacaaccatcaccataattttttaccagaaaatcttcattataccaaatggaaacttcatacttttaatcaataactccccacttccccctgccccacccactggtagcctctgatactatcaatctctgtgaatttgcctagtttacatgtctcatataataaggaattatatacgtgtattatttttttctggattatttctcttagggtaacacttttaagattcatccacgtcgtagcatatattacagcttctttcctatttatggctgagtaatatcccaatatatgtttatacctcaattttaattcattcatctcttaatggacatgtgggtggtttccacatttttgctattgtgaaaaccgctgcaatgaacttacacttggaagtatctgtttgggtttctgtgttcatttctttgggggtacatataggagtataaatatggggtcatgtggtagttctatgtttaagtttttgagaaacagccaaactgttttccagtttgctgtgctattttatattcccatcagcaatatacgagggttccattttctctacattcttgtaaacacttactatttaatattttttaaaacttatagccattctagtaggtgtgaagtgatagctcattgcagttttgattttcatttccctggtggctgatgaagttgagcattttttcatgtatttactgacaattttaatattttttagagaactatttattcaaatcatttgctgtttaaaaaaaatgggttatctttttattattcagttgtaatagttctttatatattttagatacaagtcccttatggggtacatgatttgcaaaatttttctcatattctgtgtcttctcactttcttcatggtgttctttgaagcacaaacatttttaactttgatgaagttcacttatctatttttaattttgttacttatgctcttgatgtcatattgaagaaaccattgcccaatccaagatcattaagttttactcctatatgttcttctaatggtttgataagttttgctattccatttaggtttttgaaacattttgagttaacttttgtatgggctgtgaggtaggggtctaactacactatctcgcatgtggttatccagttgttccagcacaatatgaagaggctaccattctttccccattgaggaatcttggcacccatgtcaaaaaccaatgggctgtaatggtgagggtttatttctggactcttgattctattccattgatctctatgtgcattcttgtgccagaagcacactgttttaatgattgtagtgttttagtaagttttcaaattaggaagtgagtcctccaatttttttttccagattgttttggccattctggggtgacttttaaaaaagatgtagttcaatggttctcaaagcaggagtggttcagctctccttttttggcagtctggagacctttttaggaccttaatctaagtagataaattattcccactttcttttctgagttgctatgttacagtgtatattgacacccatgaaataattgagagaccctggaagtgcttgcctacatagtgagggacaattagttccatgatcatgggcacagaagattttgttttgggaaacaattttgttggtggagttatattcatgcttactcttttatttgtcttcatagcctgcatctccttcagacttcatatctgtttattttcttgtttgtcctctggggtttgggtgttgggtgaccagtcagctggagctggaggaggtgcttagcaaggcagtgaccctggttgggaggagcagggctcagcagggtgaaagtagctgggccttgagtcaggagtggcatctggaaggcctgactgtaagggtcagaagggccagcaggtgggtgtcctaggcacaaacggtggctgctgctgtggactggaggaaggtaagaggccccgagtattccatgttcttactggctccccaactgaggattcctctcctgggctggtgctgtcctgcagcagggaggggttagacagggacggctgcacatcaggccggagtccatgtcatcctcttaggcactgtcactacagattgaggattctgttcataagccaagcctttgcacaaggaagggacccgggctctcaaggaagagcagctcctggtcagacctccatctccttctctctcattgcctgaggcctcaagcttggtctacctggcacaggggtctggatcctcctcccagggttggggtcttactgagctgggcacctgcaggtgggagaagatctggaggggccccatctgccttcaccagattgatgttgagggtccctgagtcctgcaccactatcaggtgctgagcaacttccagtgtcagtgacaaccaccccatggtggaagcagaaccacctcgtgagaaagcacctccaagcctcagtgcttgccatgtgtgggaatttgctggtttcagttgggggcatgttggtgggtggtcatgaattcagggccggattctatgctcacagtgcacatgctggatgtggtacagaccccaggcagggctcagtggggtggttttgggtgtgcacaggtatcttttctggaggagctggtggtgatttggctcccagaagttcctgagctctgcagactcaccaagcactcaatatttgagtgaacattgggcgagagagcagaaggtaagtgtcagggcatcggggttggtgcctctgggaagaggaggaacattctgggaacaaagctctcccccggcttacagggagcttcccatcgctcctgccttgaggatcagggaaactagggcctctgctcttccaggggctgcttgcaggcagtttgctctgggagggggtgacccaggagttgcctctcattttgcatttgagatttaaaaggagaagggacagtatatcttgccaggtcacaaaaattacaggcatcatattgactgaagggcactcctgtcatcactgcaatataccagaatggtcttttaaaaaaataagtgatttaggtttaccagcaactgtaatgcttgttttattcttctagttcaccgttaatgtcacttttgtagttttagcactggcaatgttgattttatgttgactctgatgattttaagctttcatttgttcacatagagatcatcttctttctgaatattaatgcattttttctctatttctactggttattcctgtacatagagtagagaatcacttttcccaaggaggtggaaagcttctgactaccaaaaaaaaaaaaaagtgtcaaaatgctttaaagtcagtaacttaaagatcaaatccaagagtgggcaacagattctgcccagggtctgaaaggtggagaggtgactggtgaggatgtttaaaagacctctcctctctactccctaaatgggggccatccagtgttcttgaggttcagagaaggcccagggctggggcagcagggcactgtcagctcccagctcccaggggccaggagtaagaccccaacactgtccagacactgattgcattcattttgggggagagtagattcttatttaaagaataatacaaaagtctacaaatatgaacataaacagaaattcctttgctacaattttccccttaataagacattccttcctaatgacatatgtgactgcattcatggctgagatgttttctaggatggtgagagcatcagagtggactatctggtgccttggggtcatgcattttcttcttccaatgtctacaggatcccccatgtcccactttgtagtgtaactcagtgtgtgtcattctggtttttgttgtatagatccttggaaagcccatgtcattcctgctgtgaggtacaggcagccaaatggcatcatctctaaacatgccttctcctggtacatcaaattatggaataaatgaaagccattttgacagatattgaagatataagtttctactcttcccacacatgcttctcccaagtgaaggattttactggtgaattgttattagagattagtgtggatcagtgactctgccaggggaaattttgccctctaggggacatttggcaaagtctggaaacattgttggttgtcagagctgggggagggagtcctgctggcattgagtgggtggatggtgctgaacaccctgcagttcacagagccccaccagtttgaccacccaaatgtcaatgctgaggagtggagagccctgctgtgccctcccgcagcttccctgaagcttcccctcacctgctcctcccatgtctccccaccacttccccacttcacccgcctccttacacctcagtcccctccacctgaactcaccccttagtccaaggccagccctgatctccgctctcctggtctccttgctccttagcaggaggcgcccactagatggcgcccttgcccttactggagctcaccgtctccctttccaccctgagacaaatgtggctgcttttactgccacaaccccagccctccacactctagatttgctcagggagcagctcctggacagacctcagggaccccagggaggagcctcactctggagattttgatggcatggtctttgaacttcactgttacccccagtcaggatccaggatgttgggagtgcatgattctgcccggtcccacttcagcaggaccccactgctgagttgtctgtggggacccgggcctctcatctccttcttgcattgcaggagagggatcttagcactgctttcacataaagtcagataatggaggagtgcaggtgagtttgggaaggtggacatgaagagaggttgtgtccctagaggtggcagcagtgagaggatgggcaggtgggaggaacacagcccatccagggttgccagccatattaggagcgacagcctttcctctaagcctccagcctttttcctgaaacattccagaactttccacttcagcacttcccactgaggctcctcaggtctgtccctgagctcccagctgagcctacctacccatctgaaatcctgagtcctgtgtcaccctcgttccccattattctgtgcagttctgtgggacgcccagctctcctgacacccccagtcttcagaatggccatcagcgctgtcgctgtggcaccagggtgactgccgcctggaggctgagtcctggcttcctgacagctgtggggcccgctctaggctcccttgtcctgatcattcatcacctccaggatgcacagcagctgggccagggggaggagcagggacaggtgtcagccaccctgtgtgtctgcaagtcaggctgggggtgtgggaggacgccaggaatgactgaactttctgatttagagggtgagagcttgcactgatggaatttgggatttaataggaaaagcatagcgttttcctattttgtaggcagggtggctggagtttggaatcatagattcccctgggatgtcactgtggacctcagtcccacccgttaggggcacagatttcagaatccacaccctggggcaaagcaggcatgggaggctccatcagcctggccagggctctctatttgtgcagctgctgcaaggagatgtgcactctgatgggaacagtgctccctcctccttggggggcagtatctagctccctgcagcccctctccctgcaggccctgccctctctgaacctcaccttccccaacccgccccccgcaatcccatctcagctgtaatcccaacactttctcatccattatgggtggactgcttgagcccaggggttcaagactatgctggctggacaatatagcgagttgttgtctctacaaaaagacaaaaattagctgtgcatggtggcatacacctgtagtcccagtcactcaggaggctgaggtgggaggattgcttgagctggggaggctgagttggcagtgagttgagattgtgccactgtatacttcagtgtaggtaacagagcgagaccctgtctcaaaaaataaaagtaaaaaaaaaaaaagaaatatggaatacattattgttaactctaatcaaccatgctatgcaatagtccaccagtaataccagtaatagccaataatgaattatctgaaaaagaatacaatttattcttagctatctactgctaaaatttttaagctatcttttatgatagctgaaacaaaagaagtaaatttaaccaaggaagtaaaagacctttataatgaaaactgtaaaacattgatgaaataaattgaaaaagacacacgcacaaatagaagatattccatgttcatgaattggaagaactgatattgctaaaatgtccttaccacccaaagtggtctacagattcaatgcaatttctgtcaaaacaccaatgatattcttcgaagaagtagaagatcctaaaattagaaaccacaaaaattcctaaaacctgcacaaaacaccctgagttgccaaagcaatcttaaacaaatagaacaaagctagtggcattacacttcctgacaatcaaagcatactgcaaagctatagtaaccaaatcagcatggtcctggcataaaaacaagcacatagatcaatgaaacagaataaaaatcccagaaataaacccatgcatctctagctaactgattttcagccaaggagccacatgcacacaatggggaaaggacagcctcttcaataagtggtgctggggaattggatattcatatgcagaagaatgaacctagaccctatccctcaccatgcacaaaaaattaactcaaaatgtattaaataaagacttaaatgtaagaactgaaactatgaaactactagaagaaaatatagggggaaaatccatgacattggtctaggcaaagagtttttggataaaatctcaacagcataagcaacaaaaccaaatataaacaaacgggatttcatcaaactaaaaagcttttatacagcaaagaaaaaaaaggccagcagagcaaagagacaacctacaaatgggaggagaatatatttgtaaatatatacatatatatttgtaaatatatacatctgataagaagataatatccaaaatatataagaaaattatgtttctgtatagttttatctgactgggatacagaggccacatccacagtcccatcctcaaaggccacttgttcccaaaatgtcaagcacatccctcaatgatccatcatcaacacctatgtctgtaggatgaagggtgaatcatgaagcactaaaaaggaagaaggaagccaatcccaaaacaaaatgatgcagggtctggaaagtccaaagcattttttttttttttttactgcatcttcctcctttcttctccacattcccaatcctcactattgattaacaaaacaaaaaaaactgggacccaccatcttccctactgtcaggagatctagcgagattgtttgagtcttagaccaaactttgccataagccaaatttctggctgactttacaatgatatgagctagcacagtctctttttctgccagtcaacttgtgctcggttttatttgcaaccaaatagaggtggtaaccaaatataggtgaccctaaaattagtcatcaggatgaaatcctaaaatgtgcaacaaactgggttgaattcaggattagtagcaacatctctgttgtgggcttgaaaagggggcacccttttatgcagtagcaaaattgctaaattgttgtttgctgagtctttggactctcatcccggattttctatgaccattcaaacagggctgcaatgaacatctatggttgtttagcttggcacacttctacatttctatatagtaatatctagaagtgcatttgctcaatcacaagatatgcacattttataattgactgctatcgaactaccttaaatagccttaatttgttctcaacattgtttaacagggtctgtttaatgtcctacgtccagcaaggacagtatcacttttcttaatatttttcaaattattggaccttaacaaatacttaatgtgcaattaattgattcctttgtattcccatgccttcttttatatgtttccttatagtacacaaaaccacattattgtttctttacttgtgtcattccaccctggaccattcctatctaaactataacattatgagagagagagagagagaaaacaatatgaaaatataaattgattaatcaaaaaaatttaaataggacaaatcaggaagacacaagagagattttaaaattattcagagaataccacaatagctgtaccaatatattttaaaacttagatgaaacggacaactatctcgataaatgtaaattaccaaaactgactcatgaaaaaatggatattatgaatagagcaataatcagtaaagcaattaaaaagacagttgataatttttatttactgacaacaataacaaaatttcaggtcctgatatttttatggtgaattttaacaaattttcaagctcctcctcaaccaattctcagaaggtttaaaactttaacaagaaaacactttctaacacattttcagaagctgttatagcatgataccaaaaccacacaagaaaattatagaccaatctcacttacaaatatacatgcaaaatcaaacaaaatcttagtgaaccaaattcagaattaataatagcaaacaagcaaaatatgttatcatacgtatggcttatatcaggaatgcaagtatgtttcaacatcagaaaatacttctccacattaacagactaaaggagaaaaacgcttgtttaattatctcaataggtttttagagaattttgaaaattttataaagttatgcgtattctgtaaaattgatgaaatccaaccttgatttatttttaaaaattgcctttcctatagaattataggtaaaggaaacacatgcatcctcacagagctacttcaaggctaagttacttcccataagtaacgtatcctgtaatgtgtgcttggcacatattcaatactaaacaaatatttgcaaatcctcaaaccacttctcgctcaaataacccacctttgtcttttgcctttatgttagggttgattttctcaattgtatcttggagatcctttggtgggtctttcagcaattaccctgaatttgcttttctgtttacaattttaattcctgggaactctttcttgttctctgactgcacccttttcatgagagttcagccatcaatcctccagaaccccaccccccccgcccccccaaaaagcaataaagatgtctaaaagcttccttctgggctttcgaatgatgtttaccccaggcatttgttctattcgttcatcacccattttccctacaacttgcctacacttgatatcagatttttatttattagtcacctatcttcttcattggcccattttcctattttgccactggttgttctcaaatgtgttatgattcctggttgtacagtcaagtggttgataatcttggatatacgataaagatttgctctgtagctgtgtgtaagcctatataaaagcttttgtatttttcttcttaaaaaagacaaaagatggttgggaagatccctccagttcaccagttcgaggctgcagtgagctatgatagcgccgctgctctagcctgtctgtctgtgaaaaacaaggggggcggggggcgggggggaagactggagatgtaaatctcccgcagggccctacccgtatccgcaacaggtctctaacaggaacagcctcaggcctgtgttggaacaaggtaggttacagaaatctggaagccagatctgtaacttcagggtaaggactggctctcagggctgatcccccgggctgggtgtcccagaggcacccgcccccgccccttccccaaggcaggccaggacaccttcactcctctccttaggctccccacccccttctcctccccactgtgcctcctggagtagcggtggcggtgccacaggggagcggggcggggcgggctctgagggcaagggggatgggccccgccggggtcactggcggccaccctggaaactcgacgcaggccggcccttctagtgaatcgtcccagccacagctggcctcccagccgcgcttggggcgcctcggggcgcgaatggtgcaggttggggagactcaccacgcaccgtcgggggtcggtccggttattcctcaccgctcggctccagtgggcgcgcgggcctctcctcctcagttcctgcgctgcagtccctccctcacccttcgcagcttgggaatccaactgtgtcattccgacggagcgccgtgaggacctccgagggtgttagcgccaagtgatctctgtccagcgctctgaatatccaagtaaaggagttcaatgaagggcgggtcaacggaggagaaaccgtgactctctcaagggagcccaaggcctccttgtctaattagtgacgcgccaatggatggaggctcttcccaccatctcttcccagcatccagtgacaccaccgccaagggacgggctcggcggaacctgcaggaaagaagcatcggctgagcctgactgcagcgctgtgaagagacaggggaggggatcagtagttggtcccgcgcccaccccctgtttccgcgaggggcggagttgactggccatgcaggcagagggcgaaatgtgaaattccactactcctaccgtttttccctgacccgatggggcggagtgtcgtcaggctaagttccctggcggtaaggtggggagattgaggcgcacacctgccgaacggtaacgcaggattagctaaggcgagctcaggacagaagcctcccgaggagcaggagggcaaaataataaataaataaataaataataaataactcactccttggtctttatttgcggcaggaattcagaaggtgaaagcggggccttaggatctttctgaccttttgggttttaagcaggaggtgtcagaaatgttaccacagggctagctggcttgtggccagcaagcgttcacaatgccctcgatttttcatccctctctgtgggttctttttttcattgtaaggcagaatttctacgattgctcacccactcagagaacctgagctggtttagaccaggtgagacaggctaggtttaccctggtgatgatgtgttgttgccatggcgatcctgcccagtaccagaggccctgcagattcagatgcttggtgcctgtgcttggctgaggggccaatgggtgaagctgccatctgcgggatgatgactgaagcctctaagtcagaatccgcccaggctgagccttagggcagctccatggagcctcggctggcctgggatagagagtccaccactgtgccagcccccagccactgcctaggtcctgtgctgagagccccttgtccagggaaatggcgtccagtggaaaagggaccacccccttgcccttcactcaaggcaggttggtgacaaccctgaagctaatccgttcctagaggagctgcttctgggtccgagttttctctgcagcagagcagctccctggatgggatctgttcaaagtccgcctttcacgcggaattttccgtccttgcaattttccacctccaccactaggggatcctctctgaccgcctcatgccggctctggcctctgagcaggggtttctcttctgcatgtgcgaccttgcgcatgcctagtggccttttgggacctagagctgctccacaccccgatggggttacagagtgcctcgcctccactccaccccaccagggttccttccctggctgggatgggatttcagaagcgccgaggaacagcccagacaggtgtgggagagtagccaaggcccctgtcccggggtggccaggacagcggtggcctcgcataggacctggctgggctgctgcaatcagtgtcctgccccttggagagcaacagtgaaaacaacaagactatcttcacccaccttaagaaagaacagaaccagtatccccaactctgctgtgtatcccaacccaattccattccccaccccactctcagtagccaatatgcaaaatattagaatactcttactgttattattttcaaccacactctgcatcctgaaaaaccatatatttcgttatgtgcttttaaacttcttgaaaatgaaatactgaggctgggcgcagtggctgacacctgtaatcccagcacttcgggaggcggaggcaggcggatcacgaggtcaggagatcgagaccatcctggctaacacagtgaaaccccatctctactaaaaatacaaaaaattagccgggcgtggtggcgggcgcctgtagtcccagctacttgggaggctgaggcaggagaacggcgtgaacccgggaggtggagcttgcactgagccgagatcgcgccactgcactccagcctgggcgacagcgccagactctgtctccaaaaaaaaaaagaaaaaagaaatactgaattttcaaatacttgctttttttttcggtcaaaattatgttctcaaatttcactcctgtagatgtgcgtggctggctgtagtttttgcatttttattattaggtattctcctgttgcattaatatgccacattttatttctctcatgtttttggtgaccacttggggtgttttttggttttgtatttttgctgtatacatgctgccatggtggacatacctctttatacatatttcctgttgtatgcagacacaattttaggatgtgacatcttcagcttttctattgtgtcgtgtgtcttttccttcgtgctttgtgttatttacatattctggacacagattctttgtcaactgtatgtgctgcacatctctttcccagtttgtgtcttcttcttcttttttttttcttaaaaaaaactttctttatagtgttttttttttctttctttctttgttttgttttgtttttttgagatggagtcttgctctgtcacctaggctgaagtgcactggccgatctcggctcactgcaacctccgtctcctgggttcaagtgattctcctgcctcagcttcccaagtagctgggattacaggtgcctgtcaccacacccagctaatttttgtatttttagtacagatggggtttcaccatgtttgtcaggctggtctcgaactcctgacctcaggtgatccaccctctttggcctcccaaagtgttgggattacaggcgtgagccacagcacctggcctgtgttctttcttaagtagatgttacttttaatataatagaatgtatcatattttgcttttatattagtactttttctatctaattcaaacacatccccaagggtctttgtgtgtagactgaccaatttctcaagaatcatgaatgaatactgcttctctttccccaatttatctgtaatgctacctttattataaagtttctatgcatgtgtagaaatagttcctgatttttcactctgtgccaccagcataccaatagcacgctgtcttaaatattaaatagcagagctttatgagacaacttgatgtgcagtaggcaattgcccccttgttactcttcttcagggttctttgttgtaccacatgaattttagaattggcttgtccagctaaaagacaactgcaaggattttatttggaagttcataattctatacataatttggggaaagtattttcataataccaagtcttcctattaatgaacacagactctctctctctctcccccacccccacctgtttagttatttatatctttatggtctgttagttattgtttattgtctttcaaccaggtttcatgtttttctacatagaggccttgcatgtgaaagtctttcttcctagcttgctattacaaattttttttaattgcactttttgggtacagtggcttgtactgtaatccccgatacctgggaggctgaggcagatggattgcttgagtccagaagttcaagaccagcctgggcaacataatgaggtccctgtctcaaaaagtttgttttaaaaattgcatttgctgttattcaacaaatgtcattgtgtctcatatatggatttttatatctgataaccttgttcaacaatcttttgattctaacaatatatcagattcttttgagttttccatatagacaataatgtcatctgtaaattataattgtttcttctttgttatttcttggaccttttattttatatttttgtcttgctgcaaggcaatatccctctatatattgtggggtcttttttctcataaagtggggatggtgaacacccttgtcttgctctctgattgtataaagcatgctttctgtagcattttgtagacgctcttttttagattgaggtaattcacttttatttctggtttactgagtttttagcataaattcaggctgaatttgagctaaagctttttctggagacatcatttgaaaaattcatatgatttactttctttaagtcaccaaagttatgatttacattgaactgagtttctactgtttaactgtattcttgggagaaaacccacttgtcactgaacaatatctgttttatttactgctgtcttgtgtctaaattttcttttaggattttttgtatatgctcagattagcctgttattctcctttctgtatttttttctggtttgggggtcaaagttataatagcctcacaataagagctaagaaaccagccctaatggaggccggggcaggaggtttggagttcaagaccagtctgggcaaaatagtgagacccccatctctatgaaaaatagaaattagccaggcatggcagtgagtacctgtagtcctaggtacttgggagggtgaggcaggaggattgcttgagcctaggaatttgaggctgcagcgaactatgattgtgccactgtactccagcctggatgacagagcgagaccctgtctcaaaagaaaaaaaaagaagaaataaaaaggaaaagataaaagagctaagcatctgtttccttttttccattttctgggagagtatgtgtaagactgtaattaactgtttcttgaataatgggagaactctgtaaaataatctggctttggtgttacctgtattggaaggatgaaaaataccaattcagtttcattattggttgatagggctactcatgctttttgttttgttttgttttgttttgtttttgagaggaagtctctctgtattgccctgttgtccaggctgagatgcaacgttgttcacaggcctgatcctggctcactacagcttctaacttccgatctcaatagatcctcccgcctcagccttcccagtagctaggactacaagcatgcagcatcacatccagcctcttttcctgcctgacccagttctggtttcctttagttttctaggtgttcatccattttatctaatgtttaatgcatttggcataagggtgctcagtgtcctttcattgtctgttgtctgtaactgttgccattttcattcctatttatgagtactggcgtcttctctcactttttcttaataatcctgctggaactttgctttttaaagaacatcttttgacttgttgattcttttttcatacatattaactattttcttattttttgcctttatatttatttcttttcctgtttgaaacattgctcttttcttactataaaaatgggtaagtagctcatgaattaccacctcttttaaaaatcttttctactgtaagcattttagcagtttacatttgcccacaagtaccacttcagctacaccctatgtgcttttacataaagtcttcatttttggtaagacatattctcaaattttaattatcacttgtttttaaatccatgatgttttatttgaaatgttgtttctaaagatacattttctggttatacttttattcttctaatttagcacagtggccacaaaacatggtctgtgcagtgcatacaatcgatgagtaatttctgagctgtagtatttggcataatatatggcaaaatttcctaagttttccatgtgtgctttaaaaaacttccagtaaaatacataaatctgttagatcaagcttctcacattgttcaaatagtctatatgtttactgattcatttgactgcttgatttatcaattacaggtaggaatgtattcaaatctcctattaaagtgtgacactcaagtggctttttaaagacagagatgccaaaccaatgaatacatgattttccccaaagcctgcacaaattctctaatgaaattttaccatgaaagtttgtttaattaaggcttactaaagcagtatgttgtcttttactttttaaacagagaatatatattttaatacatcgtttaagtttatgattaattatctattactgaggataagaatctttgcctgtgctcattcagcatttgcacttcatttatgatctgccttctcatagcttctgttaatttttatactagagacatttatttgtttgtataaatgttgaaggtttttttttgttgttgttgtttttgagtcagagcctcgctctgtcacccaggctggagtgcagtggcatgatctcggctcactgcagcctccatctcctgggttaaagtgattctcctgcctcagcctccagagtagctgggactacaggcatgtgccaccaagcaaggctaatattttgtatttttagtagagatggggtttcgtcctgttagccagggtggtctcgatctcctgacctcatgatctacctgcctcggcctcccaaagtgctaggattacaggtgtgagccaccgtgcccagctgggttttttatattataaggagatgtaatagatagatagatgtttcaaagatagtcaaatgtttttaaaatttaaaacacttttttacaggttgactttcaccatttaatttcatctatgtgttttgccttagagaaattttaaatgctatgtagatctcatgacttataattatgaagcattttgttttctgttttccacgaaacttagcttaactttgagcatataatagttgtaaaggtaggagagtaacactgaaaaaaggaattgcataaaaatggcacattttctgtagagttgtttatcgcctgaaaataggccccatttcatggaagtaagatgatcaggctcaggtccccagacgaaactcttggcatggtttttggagatagtccagggctcagtactggctctatcatttgctacttctcccaaagtaaccaatatctcatccaccctgagcccatttccatatctctaacatgaggataatagcatctaccttacacaccaagtagagggatcaaatgtaggaactaaatcaaagtaccagcactgaataacctacatcctcccacttcccaaaaggaagagagatgtatcccctgttgacaaacgagaccattttgcaggagagaaaggaaatgccagttcacttgcaatgtaaacatgctctctctttttagggatgtccagggacctgagagagaacccatgcttaccaaagagtttctagttccagacacacaggactcgaagggtgacaagtatggttttcagggtccctgaatccacccagtcctcacagaaactcctaaaagctgtcgattgacagcgttgagttcacagctctggtcctcacatgctgatactgcttgtgatatcgaacccgacaggaccccacatcacaattgatttaccaactacaatataatacctcctgaatctccaaattggctcacccaggaacaaaggcttggggtaaaactggattaggagatataagctctgaattttctgagggtgagacacacaaggattctaagtgacacgccacagagtaacgggtctgtgactggaggacccacagatttgtcttactggagacaccacatgcacacaaactccatccttagctgtggaaacaagggtcttttgctatcttagccgaattctgggagtaatttttggaggggaggagatctttgggattgcctctttcaggccctttacaaaaatacctacttcttaaatggtaaagcttacactaaactgaaaaaattacatccttggctttttatgaagtaggtgttggattgaatcactactggaagaagtatggcatcgcaaattctaagcagtggtcaaaggatggatctgttaaattagaaaaatctctaaatttataaaaagattttagattcctttattctaaacaattgacctatttgtactcatgggacaatcaaatttcaaaggagatatgtaacgatttcatggcttgcattaaaaatccttctgataaaattaaagataaaaaatctgaccccctgccaaaaaaatcttttgaagttcatactgcctgctttcaatattctgtgggattcacaatgaaaggtgccttatattgtggcctagcttcaagtttatgccttcgccaccatggcctgggttcaattcccagtcagggccccagcgcctttggtttaatgtttgcgtggcatttgacttttttacctatttagtattggtgagattacctttggtaaaaaaaagtttaaagagtggaaatcgcaattctttgtgttggctaaaatctgattataagagatctggaaggttttatttttctttttcaaagagctctatggtcagaagtcggcttcatgaaaagctaatatttaattatatgtacatacagtctttctggattttctcttttgcctcctgttttgaaaaatatttggatttgagtgaaactccgttttagaaattaattgcttggtacaatatacccatgtaactaccctgcacatgtaccccctgaatctataataagagttgaaattttgacaaaataaaattagattttgaattaaaacaaataggtgcttggttcctctgctcacttctttttaaaaggaattcctctcccatgtacttcttcttttcccttctttaccttccttttggcatctttggtatcacatgaagggatctagagggaattttaagtgactctgaaattccttgagaaatacacaaaaagatcccactcaccccttttgggggtctcctgttctccttgtggagtccagagtcagggacaggctcctccaggtctgcagctctgctctcttttatttcatcttggctgattgctttggttttgtgagtaccaggcattactttgtactgtgagagacacgtcctttgtgagtgcaacggctgctgggtcactggtgagggctgcagtttggagatggctgagagccgttgcaataaatggttgtgattgcagggggctccttgtttctttgcaagtttagatgagaaaggtgcagtttggacacagtttaaaggctgtgaaaacaccaccaatgaatatgatttcctttggggatggtctgattaaaagtgggctgattgttgctgtgctactagccttgaagacatgtttctacagcattgtgcagtgtggaaaaattgtgtggcttggtcttgtggcatgtcccttcttttagagacctcagattcaatgtgaaattcgggatttttgattttcaaagatctagatgccctgccttccagatgtgcctactcttcacatattttaaaattagatcctataaactgcaaatactttgttggcttctgtgagatcagaggtccagttagaaaaggaagacagtttgttaaaattaaaaactatttatctaatctaactagattggcctccaaatatgactttctgacattcagctggttactctgaaaagatttctaaatctcttgaggctcatctatatgtttccttgcaaagaaaaaaaaaaaaaaaaaaaagcaagcccaagcactagtaagaaaaagatttgcaatgtttcatgaaaggagtagatgagtgaagcatttatttgtagatactgggttggatacctgtgcaaagaagaagaggtcaataataaaaattgccaggggatttcttggaacttaacaagctgaattaaatatagaaatgtcaggaaatcaaggcaggaaatactcacttgtggttaggcagacagggcagggttctgagcttgagatggagcaaacagttgtggtgggtgaagttcacatgctttagagctcagctgtcctagtaaagaagcctaagagtctctaaagctcttatgagaagatggattttttttgcctagattaaaaggttaaagaattgctttaagttggataaaataaagctaaatgtttaagcaagttgtgaaaggtttatgaaaaaattaattaaaatatttttgtgtgtaaacatattgactaaagttgaaggggtataattcagcatttctgtaaattgagcattgaaataaaaacacaatgggtttctcttagagcactaacctgctctttaacaaaaattgtaaagggttatagaaagtctataaaaatgttaccttatggtcaaacattaaaattgggtaaatatgtctatcaggttttattaagaattaggtttaacattaatagtacactaatgtaaaggtgaaatttggcttatttggtacaaaaatcatacaggaagcattgtgaaatataaaatgatttttagctttctttgggctatatttctataaatatgttattgatgagggttccaaagttatgggagactcctataattctgctatatctcagtgtacattatcagtcataattataattgtcatgttaaattattgtgggccacagaggtaacagatttccttgtcaattgtgtctttgactatgactaccctaaaacgttcagtcacccatatacacatgttaccttgttttggccctctttagaaggtaattttataatcagctataaagccctaacaggtgctcttaaatgcaaattttgataactttggagattgtgacatcagaagagaggaaaaatgttcgggacacttggagagctaaaatgttcattgatatcaagcaggacaggaattaactgcatgaagtgaactaataggaggctgaagtgatctttttgactttttgcttaaaacgttgctgatcctttgttttgcttttcagagtcaaggcaaattttcttttgagctattgacagcttttaacgattaatcaaaatatactcctatgaacaccatttggagcattatttgtttctctctacccgatttccccagaatttggaaactatttgtgggtattcttaatttatggcaatatagttatttgcataagtgcaataagaatgtgttttctttggtaacaggacacaatttgaaaaactggttattttaccaaggttttgaccagaatgctgtgctttcctttaaggaatcaaacttgacttgtggagctaataaagcctttggaaaactgaccttatatcctgtgaacacagtccctgtacagggttactgatctgtgggaagaaaagaatgtcacattctgacaggtcaggaatcccaagttatcttgaaacttcaagaggacaggaattcacccaaccatatgtatttgatggtagaaatccatggcaggggctcagctttaaaaagtcttatctcagattccttctataaaacaaagtcccattaaaaccaattttaaaagcctatgtgaaaaataattattcttgctgcacctcgtacaaataaagtggcaaagcataataaagcaaattggtcctgtcgtaatttgtctttagtaaaaacgggaaactggggtcgggtgcagtggctcactcctgtaatcccagcactttgggaggctgaggtgggcagatcatctgaggtcaggagttcaagaccagcctggccaacatggtgaaaccccatctctacaaaaatacaaaaatgagccgggcatgatggcgggtgcctgtaatcccagctactcaaggggctgaggcagggaagcggaggttacagtgagtcaagatcgtgccacttcacgacagcctgggtgacagagcaagactccatctcaacaacaacaacaaaaaagggtaactggagagagggaagttatgtttcaaaaacttttggaaactatagtacacctgtttttaaattctagtctggcattcagtttttattattttctacagtttgggttaaattcgtatttctctggctacaagtctcctaaataatcttttcatttgtttcctttttctttccctttttccccatttttcttaattggaaatcactgaaacctaagctgtgctttcttaaagccctgtgaactgaagactagacaaccgaaacttctgaaggaagtagcagcaacctatttatatgtgttgctgttgcctactattatgttttagcaggtgctgcctctacacccccgaaacagagagtgctactgggaacaaatcgactttttccactccagtgctgcattcggtgccccataacgatgaccccctctcagcaggaagtagccagaaagattacaatgctccatctccctatgattcttgtgataaataaatatacaagcatgatagaaatcatgcgcaaattgacagtggggattgtggcaggccagatttcactaatggaggtccccatcacaactacttcagtactgactgagtggttaagttcagtatcaaaagctgaaagtgccagcgcctttctacaaaggctagaatgtaacaaaagcccaccaagggttttacctaggcctttcctgggccttacagcatgacaaaacaaagaaggaattcttaaccagacctgtttaggattaaacaaatttaattgggggtctgaagaaactcgccaggcctccacaaacaagttcattgggggtctaaaggaaccccccccaaacctctgtgattgagcaggagacaaggtcagggtaattgccccagcacctggactcatttagatttaagtaaatgtactgaggctccagagaaaggtctccaagacttagactagagttacagattaaaagaagttaatcacttatatctttagataaatgcacactgacacgtagacatacatcttagaaaatatataagctctggaaaaccttgtaatttacagttggtctggagatattttctgggccttctctctgtaaccggttccagaaataaaaaactctcttcctccccagtttatctgcatctcgttattgggccgtgagaaatagcagccagaccctgagtttggtctgggaacacactggctgggcttcctgcctggcggtagagcttcactgtcctccttcccagccaaaatgtggcccttgaaggcttcctccccaactgaccggttttgggttctaggtactcagggaacaccgtcttcaaggaggccattttcatactgttcctggtttgatttttctgaaattaggaaatgccccttgaggcatccaggattgtctttatttcccctgaagcttcccctcctgaagaaaaaagttctcaaacaccctcaggactcaaaccccaagttcaccctgtgaaacattcccatttcctaaacccaggcaggctcatggccctcagcctctcagaccccatggaaacctcctcccccacttcacgggttctctccatattgagagcctcccctcctcggcacacaacccagagactcaccccaacatgtgtagcaaatcaccctggaaacaatcatggctgaacgtggtagcccatgcctgtaatcccagcactttgggaggcccaggaggtggatcacctgaggtcgggagttcgagaccagcgaggccaacatggtgaaacctcgactctactaaaaatacaaagttcactgggcattgtggtgtgtacctgtaatctcaactactcaggaggctgaggcaggagaatcacttaaacctgggagacagagattgcagagagccaagatcgcaccattacactccagcctgggcaagaagagtgaaactacatctaaaaaaaaaaaaaaaaaaaggaaaaggaaaagaaaaaaaaaatcatgaggcaacattgcatttaacaatattttatttatcaaaagacacttgtctttctcaggtaagtgaaggtctagagatgaaacgagtcccgatgtaaattgccccatgggcattgctgagatcacaagatcatcactgcagcatgcagcacaatagtaaatttctcaggatggaagttcaacaatccaaaaggtagtattttttttcatgatgctcagtccatcatacgaaataaaaataaattccttttcatgatcatccattcagtagaaaaaatgatagtaaatttgttctcatgaagatttttaccgtaacatataggatttatcgttattattattattctttgttttttgtttttttgaagcggagtctcactctgttacccagtctggagtgcagtcgtgcgatctgggcacactattaacctccacctccagggttcaagcatttctcctgcctcagcttcccgagtagctgggattacaggcatgcgccaccacacccggctaattttcgtatttttactagagatggggtttcaccgcattggtcgagctggatttgagctccggacctcgggtcatccgcccatctcagcctcccaaagtgctgggattacaggcgtgagccaccgcgcccggcctcaatttatcattattcacgcatccacaaactgggttcttatattttgtacgtgattttttccattgaggagagatatctgtgcatattcatgctgctcatatttcatccacaaactcggttcatatttcatccacaaacataattttttccgttgagaagagatacttgtacatatttatgctgttcaaattcacatttcatcattcttttacaagaaatagataatgtattttaaggttttccagtggtattacagatattttactgggtgtatagatagaaattaaaccaaacttctttgttctggccgccagtcatgcatcctgttttcaacatagttcacatacaactggttgtgtaaaaatgaaattattttgtttagtacaatcatcaacagttggttgattagatttttaattatcaagttaatcattgtcattatgcttctcatcgcactcgtcattaattgctgtgggaggaaatttgttatgttccctatgagagggtgtatcacaaattcaaataagaattcaacgacaatggactgtataaaggaaataagcaagtccatggaaaacatatttttttccggaaaggattaaaatatttttaaaaaggaattaaaaaaaaattgggcacggtggcaaatgcctagagtcccagctgctcaggagatggagacagaaggattgcttgagcccaggaataagttggaggctgtagtgaacagtgattccaccactgtactccagccagggcaatagagggaaaccctctttctaaaaagacaaaaagaaacaaaacaaaacaaaaaaacaccacatcaaaaaacccaacaacaaaatgaaaaaccaaataacagcaatacaattggagctattcgatccaaagaagtaaatgaaacataaagcaaataaaagagaaaagctaatacctgtgtcctgcaggactcagtccaagttctgctctgactccctcctggtgagccaccccttaaaaagtcacttggggcggggttactttgacagacagtcttctgtcaaagagggaggcggtaaatagcacttttttttttttaatttaacgcctttccaacaaattagcggctatgttgtctaagagtgcaaatgtcagaggtgggtacaggcagcaagaccctccccacaggggcagcagaaggaggaatgactaagggaacaagactttagtgtgctcaactacacaggacaggaaacagatgctttttacaaaagctggtggacttgaaggcagaatattttcaagttcctgtaactgcgaactatgacctgtagcctgtgagagtgactttctgtggcaaaggagcttttgtgaatgtgaggaagttaattatcttaacagtgggaggttctcccggcttatctagctagaccctcgtgaaatcccaagtgtccttaggaaggggaagcagagagagatttgagtccagaagaggaagaaggtgatgtgaggcccagtaggggaacaaagggcgatggcatgtaaacacttagcccccagaagtgggagagggctggggttcatcacaccagaatccctaacaatcagccttattttaattacccttgaaatggaaggaggccttagagagccagaggcttggaggggcaccctctgctgcatacacagatcccaactgctgtgggctccaaataattgcaccagggaaatcacaaattatcaaaaataaaggatgtaaagcttttaaaaaatattaaaagcccaacaaataaaaaaagttctaaatctataaaattgacctcagtctgtatatttagatgagtcatgtgtatatagcgtttcacttcaaaatatatgataaatctctcattcattggcttaaaaataaacacttcaatcaagtctttatcagaaaaattgaaacgttaactcaattgccttttagttcatgtgactttacaaaacttaaaacaataaagtcagttttaaaaattattagtaaagtaaaagaaaaatatcttcacaatgtagacattttgtccacatgagacatgtgaaatattgccattactaaatatttgcaggtcaaaaactgtttccaaaacattttaaataatcatctggcctgtctgttttagagcattcaattctagctgaggtctggggacatgtgaaaggagccacggcccgactccgtgctgggaagagtcagacattttccacagctctgtcctttgctgtgggctctgcaactcctaccaattaaaattgcttacgtttttgttttatttttactaaagaggggttcctaaaagctaacattatactgagtatatgtaactaaaactactaagaaaacaatttcacaattatacaaatgtgccaagtaaatgaaaaaataaactgtattttaataaaggttataaaaagaaaaacatatagtggtgtgaggactgtctcaggtcttcactgagcaagggatcatgacattctatggcggacagctgaccttggctttctgctcctcttgattatgtctactaagtgacatacttactctttttccacctgtcttgcctctaagggtaacaggttttatgagatccctcctagtgctttgcaggtcagcctccctttgctgcattccaattttactgcctataccctccagctggcttttgatgacaaaagtcctggtcccagccattctcagattctgtcatccccgtgggcactatggagctcagcactatgggaggttccccaaaaatctcgttttctatgaggaatggccaccacctgcatctcagtgatgctagtgacccctttcctactcctgtgctcactggtcctcatgaagatcctggttggtctgtagccccctatttttcctattaaagagaaattacagtaagacccatttgtgtgcaaaatcaattttaggcttattacacttggcctgataatttgcataaaatgcagcaagaattcatcggccatataggctacttttgagttaattttcctgggtttttacctaaaaatatactattttggttagagtcttgtgaaaataaccaatgtgttcaattgttttattttaaaaggctcttactgaacactataaatatgtataagttgaatatacaaactatattgtcataaaatcacaacccaaaatgtggagaacgcagagggaaaggtaaatttgctcgcaaaaacatacttcacccaaataactggaaaaaaaaaaagactttcatgacccttctttaaccagagcagcagctttcaaacaaggtgtttgccttggaaatgccattcacaagccaaacggcccttgagagctgtctgtcaggcactgtagaatctagcagctcctcacagagttagaaatagtttcaggaaagagattccctgcttttagtaactgcactttatattcccagatagcgagattgtatgtaaaccatttttatcttattctggaactcttttgggtactttttttttttttttttaaatgatggagtctggctctgttgctcaggctggggtgtagtggtgcgatttcagggtatgagaaaatgcagctggacctggctctttccaggaagaccctcacagccaaggagtccaaagcctggggttttcatctaattccagtgtgactggggtaggagcagctttggtgctgggtgtgtgtgtgtgtgtgtgtgtgtgtgtgtgtgtctatgcctgtgtctgtttagggtgttaggctcgtggttgtctagatacaaatgtcccagggctcaggagccccagggttatgtcaggggcaccagatgaaggtgtcaacagaagttagggcacaagggacaaaggtgagagcaaggttagattcatttaggtgcaagaaatcatagagggaggagggagaggaagccctcctgctaccaccgaggaagaagcgcagcttaaggcagaaagcctgtccggagaggaagtgagtttgagggcagggctctctgggtaaagtacggtctgggacaccagcctgggggaagggtacagaatgcagagtggcctggcgtggggactaagaacagaggagagcagctttcactgggagggtcagtgttttcagtgtccagcactgagcaaggtgagatttgggcagcttgctgtgaaataaggtcaggctctggcattgtccccattgcgtgtgtgtgtgaggggcactttgggagagtgaactctccacctccatcctctcatacgtccttcaaccgagcttgccagttaccctgattccaaggagatctatttattgttgacaatactggatcctagcagaggctgggtaggagcctgggcacaagcaagtggaggagggggcctgggcctgaaagacctgggaggtttgagagaggacacagcccacagaatggagcagatggggtagagtcggcaagcattcagggctcctagtaagttggacaatggagaccctgaaagatccagtaaaacggggagaacaaacaggtccccaactcacatccttgcagtgcctggagcttcagactccagacaggtggggaaggaaaattgagggatgtgaacatgttggagaatgtcgtgccctgaagaatgaagaaaaggggggtgaggaatgagagcaggaacggcttccagtgcctggtgcccaggagaactcagaaaatgggtgtggtggagaggaatcgaggaaccggaagtggtggaagtgtgcagggcccctccgagatcactgtgactgccaggcgtcctccctggctggagagcttcactgtcctccttcccagccaaaatgtgtcccttgaaagcttcctccccaatggactggttctgggtcctatatatttgaaggggtggcctgcctctccacacctgtgggtatttctagttgggtgggaggagagacagagaaaagaaataagacacagagacaaagtataaagaaacaacagtgggtccaggggaccagcactcagcacaccaagggcctgcaccggcaccggcctctgagtttcctcagtttttattgattattattttcattatttcagcaaaaaggaatgtagtaggagagcagggtgataataaggagaaggtcaatgaaaaacatgtgagcaaaagaatctatatcataattaagttcaagggaaagtactatgcctggacgtgcactcaggccagatttatgtttctctccacccaaacatctcagtggagtaaagaataacaaggcagtattactgcaaacatgtctcacctcccgccacagggcagcttttctcctatctcagagttgaacaaatgtacaattgggttttacaccgagacattcagttctgaggggcaagcaggagacagtggccttcctccatctcgactgcaagaggctttcctcttttactaatccacctcagcacagaccctttatgggtgttgggctgggggacagtcaggtccttctcatcccatgaggccatatttcagactatcacatggggagaaaccttggacaataccccgctttcaagggcagaggtccctgcggctttccacagtgtattgtgcccctggtttattgagactagagaatggcaatgacctttaccaagtatactgcttgtaaatattttgttaacaaggcacatcctgcacagccctaggtcccttaaaccttgatttcatacaacacatgtttttgtgagctccaagttgggtcaaagtggctgggtcaaagtggctggggcaaagctacaaattaacaacatctcagcaaagccattgttcaaagtacaggtctttttcaaaatggagtctcttatgtctttcctttctacatggacacagtgacagtctgatctctctttcctttccctacatatattcatggaccacagtcttcaaggagtccatttcctcactgtttttggtttgatttctctgaaattaggaaatgccccattgaggcacccaggattgtctttacttcccccagagcttccactcctgaggcaggagcttctcaaacaccccccaagactcaacacctaatttcaccctctgaaaccttcccatttcttaaatccaggcagggtcatggtccttagcccctcagatgctgtggagaccttctttccctttcatacattctctcaagattaaaagccacccctcctcagcacacaccccagagactcaccccaacatgcattgcaaatcaccctggaaacagtcataagaccacactcatttaataatattttatttatcaaaagacactctttctcaggtaagtgaagttctggagaggaaaagaggagtcctgatgtaaattgccctgcaggccttgctgagatcacaaggagattgttactgcagcttgtagcacaatagtaaatttcttctctggatggaagttcaacaatccagatcgtagtatattccttttcattatgctcagtccagcaaatgtgatgataacaaattccttttcatgatcatccattcagcagagaaaatgtttgtaaatgtgttttcatgaagatgtttaccataacatacaggatttaccattatcaatgcatccacaaactctgctgttgttttttatacataattttttccatcgagaagtgatagttgtacatattcatgctgttcatatttcaaccacaaactctgctggtttttttatacgtaattttttccattgagaagtgatacttgtacatatttgtgctgttcatatttcatgtttcatcatccttttacaataaataggttatattgtattttaagtttttctaactgtagtgcagaaattgtactgggtgtatacatagatatcaaaccaaatttacttgttctggctgataatgcatcatttatttcatagattatgtatttctttgacacatttcacgtacaactaattgcataaaaatgaattttcttttagtatagacatcagcatgtgcttaattcggaatttaattgttgagttaaacatcgtcattgccttttccgttgttattaattgctctggtgggaattttgttatctcatacataagacagtgtgccacaatatctcttaaaatttcaatggcaataaactttatatttaaaaacagggaatctatggaaaacacatttttttctaaaggattaaaatatttttttaaaataattttctaaaaagttaggcacggtagcaaacgtctagagtcccagctactcaggaggctgagacaggaggattgcttaagcctacgagttgggggctgcagtgaactgtgattgcaccactacattccagccagggcaatagaagttaaccctttttctaaaaaaaaaaaaaaaagaaagaaagaaagaaaaaaagcaacaacaccaaaacctcaccaacaaaatggtaaagaaaaaaaaaacagcaatacaatgtaagctatttgatccaaagaagtcaatgaaatttaaaacaaatgaaagggaaaaagtaatacttgagtcctgcaggactcagtccaagttctgctgtgcctccctcacggtgagccacccctttagaagtcacttgggtcataagttaacccgataggaagtgtcctggccaatgaactagggaggtggtaaatggcaccattttaaatttaaattcacggccttttcaacggatcagtagccatgttgggtaagagtgcaaatgtcagaggtgaaaagaggcagcaggaccctcccctagtgcttgggcaacagaaggtggaatcactaaggggacaagactttagcatgctcaagtacacaggacagaaaacatgctttttacaaaagctggtaaatatgaagagggaacattttcaagttcctgtaaccaagaactaccgcctgtaaccggtgaaagtgactttctatggcaaaagcgtttttgaaaaggtgaggaagttaaatatcttaatgttgggaggttcttctggtttatctggctagaccctaatggaatcccaagtgtccttatggagcggggagcagagagagagatttgagtccagacgaggaagaaggtgatgtgagtctgggtgcgggacagggggagaatgatgctatgtggggatctgggctggggaatgacttagctgcatgagcggagtgacttagactcctgaactagaagaaatctagggctcatcacctcagcagccctaaccatcaaccttatttttattacaggtcttccatcgacggactccctaaaaagccagcggcgtggaggggcgccctctattggacaaatagatcttgactactttcggccctcaaatagcctgactaggcaaataacaaataataataatttttttttaaatcatggaaaatattttaaaaaacaattaaaaagttataaatctataaaatctgcttctgtctgtgtgtctgtatatttagatgtctcatgtgtacataatgtttcactaccaaaatatatgatgaaaccctcattaatcggcttagaaaactaaacacctaaatattttctcagaaaatacaaaaactttaactcaaatcccttttaattcacctgactttaaaaatctttaaaaaataaagcatgctttaaaattattagtaaagtaaaattagaacatcttcagaatttagacatttggtttaaattatacaggtcaaatactgcccttagtaaatattttcaggtcataaacaactcctgtaatcttttaaataattgaattacatgtctgttttagagctttaagttctagctaaagcctggggacaaatgaagggcaccatgccccctctctgtgctggaaagagacattttctacagctctgacccttgcagtaggctttgcaactgctacctatcaaaattgcctacatcctaagtttattattaaaaggagttgcttggagttaacattataatgaatatatgtaactaaaactatttctcatacaaagtatatgaaaaagtagaatgtatttttaataaaaagttataaaaagacatgaacatgtagtttttataaaaaacagtaattttgtctagttttgcagttctaaaaagttatgttaaattcaaaaataaaaaataacaagacaagactcaaggtttaaataagttgtaaaagatttgtaaaaattagttctataaaaattttacaaaaaaaagcattggttaaaatttaaggaattattttgtttttacagaaattaaacattcattaaaaacactctgatacaaggccttaatttgggttcatgtatcagaatagcagggttttcttagaatattaatctattctttaaaagaactatgaatgttatgcaaactttataaaaatcttaccttagagtcaaactgattaaaattccatagattttacgtaaaattttattaaaaattaacttcaacaaaaataaaatttgattttctcctttaaacaaaagttttgcgtaatattaaataataaagcatttttgtttaccttttaaactataaacacacacacacatacacatacaccaacactaaagtcagctgacctcatactgtctttattggatattcttgtttaaaaaactatcttctttggaaaataaagttttttattttaaaccatattttaaattatcattttgactaaatccataacatacagtgatctgtaataattctattttataatatcaagtgttttgaagaactccaggaacagccatgagagaacactgtggtttagtaacactttatttcctcagtttgaaaatagttgtctttcttggggaggccggtttcagcagatgaaaacaagagtcatgatgaaaattacccagcagtggttagtgtgaccataggaacattgtcatcaggtcagcagaaaacatatcagcaaatttttctcatactggcagtgtgtaggggtggatgtttacagttcctgaagccccagtggtcgtgtggtcttttagttttgccatttataggcaacttgtggtaactagctcaattagacacattccttatcacaaggacagagggctttctgtatcctagggttcttgccttggcattccagaagaatcaggtcacacgtggacgtggagaatgagtgcaaggttttattgagtggaagtagctctcagcagatgggggagccagaaaggagattggtttctccctggattggggccgttcagcagccctggctctcctctgactgccccaggcaaaatccacatcgttctataagtcggtgccctgctggtgtgctggtgcctgttgtcatgttcctcttcatgtccagccgcctgtgtgttcctccgctgatgtgctcctctcgacgtcaagcctcctgtgtgtctgactgctagggtcttggggtttttataagcacaggatgggtcttagcaggccaggatgatcttgggaaagacaacattcggtcaggaaaacaaaaatgcctgttgtcatctaggtccgtggggacaagcccaggtgtggagcttttagccagggaccacagcctcctgtatccaacacttcccttcaccttttctatatcattcaaagggatcatgcccttcccatcccagcacttcactttcatgtcatttgccccctctgaagaggtacatctaactgccattagaatatggatgatgaccagtcttagctgcttcctgctgaaagggggcattgttttgggggaaaacggcagtcagattcctcccaggggtctctataataaaagatcgaggtggctactttcaggaggtcctctaatgtactatctggtcccaagtcccatttctgcaacctcctcctgatgtcaggagctgcctgagtaataattttatcctttaggattatctgtccctcgattgaattaggagatagagaggtgtgatttaccaaggcctctcttagcctctccaggaaggcagtgggattttcatcaaatccctggttaattatggacaacttagtataattgagaggcttggtcttagacctacgtaagccctctattatgcacacctgaaagtgtctcctcttccagtcttccatctcattattgggatcccatttagggtccttcactggtgctacttctcttccagttggataatattcgctcccttccctgatgctataggtgatgcaaagctcatccccaaatctctctgctgctggcagagcagcctgcttctcagtgtctatcaggttctgactcaaaagtaacataacgtctctccaggagagttcaaatgttagggtgaaattctggaaagcttctatatatctatcagggtcatctgaacacttgcccagatctcccttaatttgctttaagtcttgtagggaaaagaggacttggaccttactgggcccaaattcactgggcatctgtaggaggggcaagagtgagactgggcttgtttgggatgaagatttctaggaggggccaggtgagaggctgaagctggatacggaggttggggtggacccagaggagcagggcttgagggagctggcacgtcagctgggggtgcgtctgggactcgtgtctttaattccctgggcttgaccctggcagccttccccgagacagcaaacaggagggctggaacaatcctacatgtcagcaaaggtctggattgctttgcaaggtatagaaagcctgcacatttggggcctcagaccatgtgtcctcacatccagagaaaagttctaattgcaggatggtattgaaatgaatggtcccttcctgaagccaagccagtccttcctgtaaaccataatttggccaaacctatgtgcggagggctatgagatgcttttcctctggattctgagggtcaaaacagtcccaatggttcaggatacactcaaggggagtacaagctgggggtggtgaggagaactggctgcccattctgaaagacagggaatagaggtgttcctcatttcccttccttcttttggcaaaaagctcagggtgtgatggggagggaaagcaagcatcttcacttcactttccacctcttacccctgcgccctggcaaccttggcaggtgccggccacaggtacaaatgcggtatgtacccatgaagcagggagaacctggagattaggaattaactgccctcacctatgtttccttttctccctgctgttgaaaaactttgagttccctgggcctttttatcccatgaggcatggcctccttctgtgggatggggttcagtcagcaggaattggtcctgtccatttacattgtgcctgttgcctggctttgaattcctcagacctgctttctctttctagggcctcagcctgaagcttggaattgagtttgggactgaaaaagcatttcagaggctgtttatatccatttagtgcctcaaataagccctgctgaatttgcaattatcagccagcaggggtcactcctctgttaacttccctattagaaacagagcggtggggattctcacttagaaaagaaaaaaagagaaaaacagttaaagaggcaaaaagtggggaatgctgggggaagaaccccttgcttagtgcaagtgggcccctctaatccttataactttcccatccttcccccagttcagaccaggttgaattccttggccatggaaggaaaggttccattgatgcagtgggtgagaagcactctgtagggtcctggctaccatcggttttctcacacccccctcatcccaggcagtggagggagacacttctgcgacattgctccccctgccccttcatggctattgggtgtggcctttgcctgctgcaggcatgcctaggtgctggagctgggagggaaaagggtaaggagaggtgccctggaagccgctcatgcctggggctgtcaaggtggaggcatacatggcacctctaggaaaaattggtctgatttgcacctttggcggctgagccaaatgctcattttacttagtaacattgcctcagcctgtagcaaaactcttaacattataaaggaagagataagatccatttcaaataatgtgtgagagagaaaagagatgaaaggaaaacagagtcttttacctgcaggaaagggagagaagtggcagagttttggaagaaaggcaggcccaacagtttcccattcactcacactcaccttccgagatcccagacgagccaccagttgaaatgggaaaagtttccttgtccccctcacaggaggtggagtgggggtgtggcttgcttctttagtactccgctgctcaaacctctagggaagcatacagactggcaagttgtggggctacaaccccatggcagcatctaggggtagatgtttacagctgctgaagccccagtggacatgtggtaccatgtgctcttttagttttgccatctataggtggctttgtggtaaccagctcaattagacccattccttaacccaaagacagagggctttctgtatcccgcggttgttacctaggtgtaccagaaaaatcaaatcacacgtggtcttggagaatgagtgcaaggttttattgagtggaagtagctctcagcagatgggggagccaaaagggagaatagttttcccctgaagtcgggttattcagcggcccaggctctcctctggctgccccagccaaactctatgtcaatccattggtcggtggcctgccagagtgctggtgcctgttggtggattcctctcagcgtcgagagtttttccctctcaggaaagggagagaagtggcagccacccatgtgttcttgcactgatgtgctcctctcgacgtccaacctcctgtgtgtctgcctgctagggtcccagagtttttttaggcacaggatagggcatggtgggccagggtgatcttgggaaatgcaacatttggtcaggaaaacaaaaatgcctgtcctcatctaggtccaggggcacaagcccaggtttggagccctagccagggaccccggcctcctctacccatcactttccttcaccttttctgtatcattcaaagggaccatgcccttcccttcccagcacttctcttctgtatcaataggtgatgtttttaaaatttcccaactctagtgcaggcatggtactagacatatacatagaaataaaaccacacttattcttctggctggcaagacatagtatttttgccaaattatgtgttgttttgaagcattttatgtacccctggtcatataaaaataaagctattttgttcagtacaaacagcagcattttctggattagaaagttaatcatcttaaaagatcatcacggatttttccattgcactcatcactaattgctttggcaaaaaatttcttatctcacgcatgacaaaatcagccgcagtatctcctagtaatttaatggtgatgatctttataaaggaaataagcacatcaagggaaaacataattttttttaaaaaaagagtaataaaactttttaaaagtcttttttaaaagactgcttttctaaaatagtaaaataaaactccaccaataaaaccaccaacaaaacagaaaagaaaaaataatgatatgatcggagctatttgatgaaagatggtaaattaaatttaaaatgattagaagagaaaaagcaatacctgtctcccgtaggtctcagtccaggttctgctatgcctttctcctggtgagccacctatttaagagtcgcttaaagcatatgttaatccaacaacagcagattaaaaaccaatgcaatctgaactatttgatctaaaaacataaataaaatttaaaacaaataaaagagaaaaagcagtacctgtgtcctgtaggtctcagtccaagatctgctctgactcccttgtggtgagttagccctttagaagtcacttggggtggggcatatgttaattccactaacattggttctggccaatgagtcaggaaggtggtaaatggcaccttttcttcttgctgatttctttcagttcctttggagtctggacattagtcctttgtcagatgcctagtttgtgactactgtttcctatactgtgggttgtgtgtttaccctgctgatatttcttctgccttgcagaagattttcggtttcattaggtcctattgatcttattctatttttatatttttgcgtttgcttttggggcattagtcatgactacttggcctaagccaatgtctagaaaagctttttggatgctatcttgtagcatttttagactttcaggtcttagatggaagtttttatatgctttgttaaagatcaggtgactgaaagtaccgggctttgtttctcggttctctattctgttccattgctctatgtgcctatttttatacttcctgcaccatttattgaataaagtgtcctttccccaattagtgtttttgcatactttgttgaagattagttgtctgtaagcatttggctttatttctgggttctctattctgttccattgctctatgtgcctatttttatacttcctgcaccatttattgaataaagtatcctttccccaattaatgtttttgtgtactttgttgaagattagttgtctgtaagcatttggctttatttctgggttctctattctgttctattgctctatgtgcatattttataccagtatcatgctattttggtgattgtagccttgtagtataatttaaagcctgccttcagatttgttctttttgcaaagtattgctttggatatgcggtcacgtttttggttttgtataaattttaggattcttttttctagttctgggaaggagaatgatgatattttgatgagaattctactgctctgtagatggctttggagagtatggtcactttcacaatattgattctacctattcataagcttataatgtgttcccatttgtttgtgtcaactgtgatttctttcagcactattttgtagttttccttgtaggaaacttacattaacctacttggttaagtatatttctaagtattttacttattaaaaattctcagggaaatgcaaagtaaaactgaggtgggaaattaaagaaaaataaaattaaaaagaaagggaaataagctttcttgtattaagctaacttgtcccagaggcagcaacaggcacagcccagacccaggaaaagtcttgataatattatttattgtattctggagactcttccagcactccttcaatgtagggagaagaaaaacaaattttcctttgttttatggtatgagtttatagattcttgttctctttaactagtaacttcaagtattctgttttatctaagaagtatggcaaaggtcatgagaagcctgagcaggcctgaactacagctctctaggcaccatagtgaagataaaccaatgcaagcctctttagagcaaaacctagataatagacatctgggttgcatagcaacagttatgtgcaatcctgagttatgaacctgttacaatttgattaactgtctttttcctgcctctgtatccctgctttcacaccactgtaagcttgcttcaagctggcccacccccttttgtgaagtgtgtataaaagtcaagtgctgtctttgttccaggccctgtctttggacgtgagtctgctgggcctgagagcactcaataaaagattctcctgttttaacccaaagcctctctctcatcctcctaaatcccacaacaaaaccacaatgagatgctatcttaatcttgctagaagcccataatttaaaagtcagaaaacaatagatgttggcatagatgtggtcaaaagggagcactttgacactgctagtgggaatttaaactagtccgaccactatggtaaacagtatggggattccttaaagaactaaaagtagaccattcattccagcaatcccattactggctatctacccaaaggaaaagaagttattccataaaaaagacacaagaatatggatgtttatagcagccgattcgcaattgcagtgatatgggaccaacttaagtgcccatcaacgaacgagtggataaagcaaatgtggtacaccatggaataatacttgataataaaaaggaacaaaataatgtcctttgcaacaagttggatggaactggaagccattattctaagtgaagtaactgaggaatggcaaatcaaatattgaatgttttcacttttaaatgagagttaagctatgagaatgcaaaggcataagaatgatataatggacttggggactcagggggaaaggttgggagggggatgaggaataaatgatgacatattgggtatattatacactgctcaggagacagatgcctcaaaatctcagaaattaccactaaggaacttttatccacataaccaaaaaccacatatattccacacactattgaaagaaacataaacattattttaaaaaataaagccacttttaaaattagcaaaataaaataaatatgtcttcagagtttagatattggatccaaattagacagatcaaatactgcctttactaaatattttcatgtcattaacaacttctaaaacctttcaaacagttttttgacatgtcttggaaccatccatttctagctaaggcctgggcacctgtgaaatagggccatgcccccccttatactgggaagagtaagatatttcaagactaagatgttttctacagctccatctttttctttaagctctacatcaaggacataattaaaattggttgtctcctaagtggtttactaaaaatgcatacttaagagttaccattataattaatatttgtatctaaagctacttaaaaattttcacacacaaatctgactgaacaagtaaaatatattttaagtcaaagtttataaaaggacatgagaacatagcttttatgaaaaaattagttttgtcaagtttagaggttttcaaatattttaaattcaggaaataaaataacaaaaagacaaaagaaaatggttgaacaacttagaaaaggtttgttaaaattcatcttataaaacaatctacatgtaaaaagtgggctaaaatttgaaagagattatttaggttttccataaattaatccagaaggggtaggaagtcttaagaatgaggaaggacaggaggaaggggaggtcatcctgacactgcagaggcagaagtgcagctgaaggtatgaaggctaagaggggaggggagtttgagtgctgctgcctggctgtcagagcagaggagggtcctgggcaccagacttgaggaagggatgaaaatgctgggcagacctgtagtgggcccttgagatggcagatagtggtttccagagagagggccattgttttccagtgcccagcactgagcagagagagttttgggcagtgtaaaaaaaaaaagagaacttacctctttctcgttttagaaaaagaacagtctaagaatatcagcagggaaactctcagtgcttcaaggggttaaacgcccttttggctttcttgtgttggtttcatcatagaggaggagaaacttcttggaagtgttcctaaaaacacaacacgtctgcttctcctttcaaaaaaggaagtgctaaaacacgaacactctagatccaaatattaatacggatgtctaaatgcttccgttttccaaggggcagaaagctaaaggttgtaacctattcatttcagtcaaagttggtgaaagggaagcaaaggaactgggtggggcttggaaggatgacgaagctcaagctcattggccagcaacctctctcctgggggcgggaggggtgagcatacgtcattgctttggcttctataaaatgaggaggactcaccgagtgtgaagagtccttctggtgattgcagctgagagcacactcacgacgttctgcaaggattctctgattatgattctgaagggaaaagcgatggaatggacagcagagattgtaattttctttatcttgaattacggaagaaagtatctaggacagaaatccacgacaagtccttggaaccagcagatctcttcgttcacggagacgttgacgtattctctattgaagaagattcttaccttcttactggacaaggttttgtcagttctgcgtgactggattgtccgggagactctgaggaaactgatgtcacatgtttttccaaagaagatgtttctggaaccaacaactgtgattgtggtttgaggacttctgagagttccagtacaggaaataagcagaacatcagctggaggctaaacggatccagacttcactcttcacttcccttcctattcagtctattgtgcctgctgactgagaagcttggctggtatgtgagcaaataaacggaactattcagaaggagatgttgacatattctgtattgaagaagatccttatcttctcacctgacaaggttttgtcagttctgtgtgactggattgtccggaagactctgaggaaactgatgtcacatgtttttccaaagaagatgtttctggaaccaacaactgtgattgtggtttgaggacgcctgggagttccggtatgcgaaataagcagaacatcagctggcggctgaagggatgcagcctccactcttcacttcccttgccattccatctattgtgtctgcctgactgagaagcttggctggtatgtgaggaaataaacggaattataaacaaggagattgtttctcatctacttcattctgttgtggcttttctattttggggttcagggtgtgtgacaaggaccaaggagatgaaaggtttcatgatggagaaagcccaggcaatcagattgaagagctatccacagggaatcttggctgctgaggggctgcaccctgcaacggactgaccatatgacagaaaagggttttaaaggctcaacttctggactgagaacccagagtaatttgggaacctcctctgtgaggagatatgaaagctgggaatcatgacatccctaggaatggaaggcacatttcctgatggaaggggtgctttggaaaacaggagcagagtagacacagcagccttgtggatacgggtgggcagcatgcatgggtgatgtgaacgtggagtgtttgtgatcgaaactcaaaatgtctgacaaagtgaaaacctagaaaccacaatgaggaggaagagtttgtgagggcaatcactctccccatgtgtgaaaatcgggggctcttaaaatctcatctggagaggtgcagtctaccaaactctgggactttagcctccccttttaaaaaaccgtgcatcaataccaacgtccgaaaccacagaaataacacctggcttgcatggagacaaggacaaaaagccgtcatgatgagttgttctgctcacttgctgcctctgttcagtgcacaggatattgtccacccactagcaggctactgcaagagaagtgtgcaatatgttccctatgtgccatatatgtgccatatggcccatatgacaactgagtcagaaaatatctgatgccctcagagttacactccacctggagcttgcccccagccatccaggacctaggctccctaccctgtccaattttctggtgttttgggggcttcattctctaaggtgtgcccactctttactcaaaccaaaacacccacatattcctgcccatgaacaaccaatcaaccacttctcagttccacatcctgctgttgggtctctagtggtgacactgtaactcccaggtcatagtggtgacactataacacctagctaaattgatgccttgtctctaggaggccatgggctcctgcaggtctcatctgactctctgtagccttccctgacaatgctcacaatacccaagccagagccacattgacagcaagctgctctcatcttacctttgccagacctggccactggaaaaggctgaccctcatcctgcaatgcctatacctccaacctttgtctcaagctggtgtcctggagggacttctaagcagaaaacagattcagactcccatcctctcctgaatggcctcatatccaattctcagaccctcagccttcattgtaaggacacttcatccatgcccttgagtattctgtctgcactgtgtattctgcaatagattctcctccctctgcgaccctcaactccttccgcagactttttgttttcttgatcatctaccatagtcttccactgggacactgccaagcccattctggagagtgagttgtgcaagtacactgccccccatctacctttcgggaggtgtatacacccttctttctcccaggtctggaggctttctattttcatcctgaggcatctccacctgctcttggattcttcaaattgacaaccaccagttaacaagaactatgtgtcaccaaatagccaaacaatggcaattacaaaaataaaattaatagctgtaacccccattagcaaggatacacaaatcaaatcagggatagtgggtgaggaagtctgcctaacattcaaggaaggattctgaagtgatacaaaatcattgcctttgctatctttagaatggacactttcagccaggcacagttgctcagcctgtaatcccagcactctgagagccccagttgggtggatcacttgaggccagcagcttgagaccaccctgggcaatgtgcagaaaccccaactctactaaaaatacaaaaatagccagttattgtggcacatgcctgtaatcccaactccttgggaggctgaggcacaagaatcacttgaatctgggagccagagtttgtaatgagcgaagatcatgccactgcactctagcctaggcattagagtgataatctgtctgtggaaaataaaaacattcctcttcaaagttttcttctttaaatcataaatgttggaattaatatatcctctttgaaactcactttcttcaagcttctttatttgatggtagtaaatctttgttaagctttatgaggcaagagtaatggaagaagcatattatatatatttatactctaacctcagtgcttgttctagcaagctcaggcatgcgtgaatgtgcccaggcatgttccagcccataccttatatcctttccttattgggaaatgctgttactcctataagcattcttgtaagcaacttcctctttttctttgtctccactatctttacctattgaggacagttttaggttcttagccagttggatgtagcatagactgtgaggtccaaccccagccaatggagatagcacacagcagtagcgacctcatgcttaacagataaatattcctgtctccctttgtttggggtgctctcagctgatgagcaacaccctttctaaagaaattaaagttgtcttgctgagaaaacttttggtctaaatgctgattcttccttgcagcactgaagaagaagcaattatttccaacactttctcatacacaaaaaaagaagaaggtggaagaaaactttcttgtgcaccctatccctcactcagaaagacaacagaaggctcctagtggcaagccctagaggattcatttcttttgggaaccctcttggctgggatactaggactcaggtcaaactcagcattttcagtgtgtgggaagtgtgcttgggtttcactgttacttccaataatgtgatttggtccttggggttcaccaaattttggtatggagtggtgaaccctgttaagtttaagtgtctataaaattaacaaagcaaaataaccattctgccccatggttcagagaccaaatattgtgtaggaaatgctttagcgagagaaacagagaagaataaaaaatgtcctcaagcgctgcattatttcttgttatcgtccagatcttagaggaaaggctttcattttccctcattcagtatgatattagctgtgcatctgtcatttatggcttttattatgttggggtatgttccctgtgtatgtagttttttcagggtttttgttatgaagtgatgttgaactttatcaaacgtttttcagtttcagttgaaacgatcatatgctttttgtccttcattctcttgatatgatgcatcatgttgatgatttccatatggtgcactgtccttgcatcctgggcatgaattccacttgatcatgacaaatgaatttttaatgcattcttgaattccgtttgctggtattttgttgaggatttttgcatcaatattcatcagagatattggcctgcagtttctttttttttcttttttctttgttttgttgtttgtttgtttgtttgttttgatgtgtctatgtctggttttggtatctgggtagtagtgttccatccccttttattttttagaataatttgaataagactggtgttggttctttaaatatttggtagaattccgaagtgaagtcattgggccccgggcttttctttagtggaaggctgtttattatggcttcaatctcgttacttattattggtctattcatgttttgaatttgttccttatttaatcttggtaggctgtgtgtatctaggaatttgtccatttcttttagattttcaaatttattggcacataattgcccattgtagcctctaatcgtcatttgagttcctgcagtaccaattataatgtctccttcttcatttttgattgtatttatttggatcctgcccctttttttcttacttaggctgcctaataatttcttaattttgttgaactttttcttttgtttgtctcgctctgccaccaggctggagtgtagtggtgtgatcttggctcactggaacctccgtctcccaggttcaagcaattctcctgcctcaccctcccaaatagctgggactacaggcaagtgccaccactcccagctaatttttgtatttttagtagacacgggttttcaccatgttggccaggatggtctcgatctcttgacttcataatccacctgcctcagcctcccaaagtgctgggattacaggcatgagccactgcgcccagcctaattttgtttaaattttcaagaaatcaacttcttctttcattgatttctgtattttttatttccattttatttatttaaactctaagctttattctatcttcttctcattttagctttggtatgcttattgcctctctagctctttaatgtgcattgttagattgtttatttgaagttcttcctctctacaccataagacgtaagcatgtcctcattatgtcataagatgtaaccacttacagctataaacttccttcttagttctgcttttgctgtatctcataggctttgttatgttgtgtttccattatcaattgtgtcagaaatttttcaatatttttcttaatttcttcattgagcaactgatcatttgggagcatatttttaaacttccatgtacttacatagtttccaaaatacctcttgtgatcaatttctagttttattccactatggttcaagaagatgcttgatattatttcaattttttttcacattttaagatgtgttttgtgacctaacatatggtctactttttttttttattaaactttaagttgtggggtacatgtgtagaccgtgcagttttgttacataggtatacacgtgccatggtggtttgctgctcccattaacctgtcatctacattaggtacttctcataatgctatccctcccctaacctccaccctctgacaggacctggtgtgtgatgttcccctccctgtgtccatgtgatctatttttgagaatgatccatgtggattagaatgctgtggaaaagactttggattcctaatatccagggagggagacgatgatattactttcaatatcacacgggtgtacacactctctgtgacattgttcctaatatccagtggaagagaggatgatataacacccagggagggagaggatgatattactcttaatattgcagggtgtgtacccatgcctatgatattgttcctaatatcaggagggggagaggatgatattactcagaatatggcagggggtgtacacacactctgtgacatggttcttaatatacaggggagaatgggacaatattactctcaatatcgcagggggcgtacaaccctgtgatttgttcctaatatacaaaaggggacagtatgatattgttcctaaaatcgcagaaggtgtacaacgccctgtgatattgttcctaatatccagggcgggagaggatgatattacccccaatatcacagggggtgtgcactttccctgttacattgttcctatgatccgagtggggggaaatgacattagtcccaatatcgcaggatgtgtacactactcccccatgatattgttcctaatatcaagggggagagaggaggatattactcccaatatcgcaagggaggtacatcctccatgcaatattgttcgtaatattcaggaggagagaggaagatattactctcaatatcgcagaaagtggacacccaccctgtgatgttcttcataatatccagggaagcagacgattatatgactttcaatatcgctgggagtgtacatcccttttgggatattgtttctaatatccaggaagggagaggattatattacttccagtattgcagccagtgtacacatttcttgtgatattgttcctaatatccagaaagggaaaggatgatattactcccaatattgcaggtggtgtacacccccctctgatattgttccttacatcaaggaaaagaaagaagaatattactcccaatatcgaagagagtgtacacccctcctgtgatattgtatttaatatccatggggaaagaggatgttgttactcccaatatcgcagggggtttacacccacactgtgatattgttcctaaaatccagtgaaggagaaaataatattgctcccaatattgcagggtgtatacaggccctcccccgttatattgctcctaatatccagcggtggagaggatattactttcaatttttgcagggagtgtgtaccccctctctgatatttttctaatatcaaggatgggaaaggatgccattactcccaatatcgcaggaggtgtacatgccctgtgatattgttcctaatatccagggaggtagaggatgatattactttcaatattgcaggggctgtacaccctctatgatgttgttattaatatttaggttgggagaaaatgatatttttcctaatatcctgggaaggaaaggatgatattactgtaaatattccagggagtgtacaccttcctaatattctaatattgttcctaatatccaggggtgggagaggattatattactcccaatatcgcagtgggtgtacacccctcctgtgatgttgtttctaatatccaagcgaggagaaaatgatatcactctcaataccgcagggggtgtacaccttccccatcatatcgttcctaatattcagagggaaagaagatgatgttactttcaatatcgcaggggttgtacacaacccctgtgatatttctcctaatatccaggaagaaagaggatgatattgctcccattatagcagacggtatacgcctccctgtaacattgtttctaatatcaagactgggagaggatgatatcacttccagtatcgcaaggggtgtacacctcccccgtgatattgttactaatatccagggggaagaggataatattactttcaatattgcaggggctgtacacccccgtgatattgttgttaatatttaggttgggagaaaatgatattagtccaaatatcgcagagagtgtacacacttccgataatattgttcttaatatccatgggggagacgatgatattacacccaatatcgcagggggtgtagtctccccttgtgatattgtccctaatattcagggaagtaaacgatgatgttagtgtgaatattccagggagtgtacaccccctttgtgatattgtcctaatatccgcaggagagaagataatattactcccaatatcgcagggggtgaacacaccccctgtgatattgtttctaatatccaagcgaggagaaaataatattactcccaatgtctcaggggatatacaccttccctatgatattgtttctaatattcaggtggaaaacgggtgatattactcctaatatccaggaagaaaggggattatgttactccccttatagcagggggtatacacctcccctgtaatattgttcctaatatcaaggctgggatatacgtggggggaaggatgatattactcccaatatcacaggggttataaaaccttctgtgatattgctcctaataaccatggcggaagaagatgatattactcctaatattgcaggaggtgtacactcccccattatgttgttcctagtatgcagaaaaggagaggatgacattattgccaatatcgcagggtgtgtacaccacccatgatattgttcctaatatttagagggacagaggatgatattactcccaatatcgcagggggtgtacacgcatcccctgtgatattgttcttgaaatcgaggggaaagagaattatatttctctaaatattgcagagggtgtacaccgccccctgtgatattgttcctaatagccgggggcggggggagataattaaattactttcaatatctcagagagtgtacatcccccttgtgacattgttcctaatatccagagcaaaagagaatgatattcctcccagtatcgcaggaagtgtacatttaacctgtaatattgtttctaatatccagggggaagagaatagtaatactcccaatatcgtaggggttgtacaccttttctgtgatattgttgcaaatatttagaagagagagagaatattactcgcaatatcacagggaatgtatacttcccctgtgatattgttctaatatctagaaaaagagaggataatattactcctaatattgcagggggtgtacacccccacttgtgatattgttcctaatataaaggaaggtcgaaaaacaaacggggagcccagggggaaggaaggcaggcgaggaagaggcagcgccggggcgccggagggagcagccgggccgcggaagcgcgagcacgagaccggtcgcggtcgcagtcgcatttttgccgttgtcgcggccgccgccgccgaggcttacccggggatgtctgagcccgcgcctcgcggcccccaagctccacgctgcgcccgctgtcccggcctctaagggccgccacgtccctgcggcgcgcgcaggcagaaagcggcttcgtgccggcggagggggcccgggcgggccgggaaaggctgccccaggccccgcgcctaccccatcaccgcggccggcgccgggccgggaggatgagcggtgtggggctctgaagcatggagggggttttgtacaagtggaccaactatctcacaggttggcagcctcgttggtttgttttagataatggaatcttatcctattatgattcacaagatgatgtttgcaaagggagcaaaggaagcataaagatggcagtttgtgaaattaaaggtgacagctttggaggggaccacccttgattggatacataaattctgttcattcagcagacaacacaagaatggaattaatcattcctggagagcagcatttctacatgaaggcagtgaacgcagctgaaagacagaggtggctggtcgctctggggagctccaaagcatgtttgactgatacaaggactaaaaacgaaaaagaaagaagtgaaaccagtgaatcgctgaaaaccaaaatgtctgaacttcgcctctactgtgacctcttaatgcagcaagttcatacgatacaggaatttgttcaccacgatgagaatcattcatctcctagtgcagagaacatcaatgaagcctcttctctgcttagtgccacgtgtaacacgttcatcacaacgcttgaggaatgtgtgaagatagccaatgccaggtttaaacctgagatgtttcaacggcaccatccggatcccttagtttctcctgtgtcaccttctcctgttcaaatgaggaagcgttctgtcagccaccctggttcttgcaccagggaggagtagccactgtataaaagaaccagtatctgcacttcaccgactctcccagcgacgccgaagaacctactcagatacagattcttgtagtgatattcctcttgaagacccagatagacctgttcactgttcaaaaaatacacttaatggagatttggcatcagcaaccattcctgaagaaagcagacttatggccaaaaaacaatctgaatcagaagatactcttccatccttctcttcctgaagaaactgtagtgtccaactttctctaagtattgctatgcaaaagctgctgtaattgaactattgttatagggagtagttttttcccttaggactctgcactttatagaatattgtaaaacagacaaacaagaaaacaaaccacatacttttgaagcgtgttttatctttatatagtttgtttgcaagagtattttcctaataacttcacagtatgaatgtgcatcttttttttctttttttaacaaatgatggtgtaacattttgacatccataaggacaaatgtagatatttttctaaaaaaccgtgaggggactgacagcttggtcagggtgtattgtagcttataaacatgaaatcttacaaggtttcagtttgacagaagtgtgatatatgtaacttgtgccatggaccaaatggtcactttaccacagctaaaaatgagttatgatagcagcttgatggtgattgcattgtattcctttaatcaaaaaggaaacgcaatattctaagtatctttagcccaaataccatgacatattgagcatctttaaataaccagactgtattgtccttcatatgtgaagttgacactactgatttgtcaataccaaattttgggttaaagtgtttaatttttatttatttattttcttgttgcctcaaaagatgattgcattctaacttttgtgacctaccaaatttaagatgtgtatacattgttctttacgttgttctagaaaagagattttaatgctgtagtgacttagctcacttacatcagagaaataaacaactttcaatggaaaaaaatatatataaaggaaggaagaggatgatattacttctcatatagaaggggttgtacaccccccttgtgatattgttcctaatattcagggagggagaggattatattactcccaatatagcagggagtgtacacccccccccccgtgataatgttcctaatattcagggaagcagaggatgatattactttcaatatcacagggggtgtgctgtccccctgttatattgttcttaatattcaggggggagaggatattattatgcccgatatcacaggagaagtacaccccacaagtgatattgttcctaatatccaggggtaaagaggatgatatcgcaggtggtgtacacccctccccgtgatattgtttctaatataaagaaggagagagcatgatattactcccaatatcgctggaggtctacaccccccttgtgatactgttcctaatatccaggaagggaaacaatgatattgctgtgaatattccagggggtgtacacccctttgtaatattgttcctcatatccagggggtagagaggatgatattactcccaatatcgcagggggtgcacggccccactgtgatattgtttttcatatccaggaggggagaggatgacattactctcaatatggcagggggcgaacaccccctgtgatattgtgctagttaggttgggagaaaatgatattactcccaatatcgcagggggtgtacaccgctcctgtgatattgttcctaatatccatgacgggagaggatattactcccaatatcgcagggggtgtacctctcccctgtgggattgttcacagtatccaaaagggaagaggatgatgttactcccaatatcacagggagtgtacaccaccattgtgatattgttcctaatagccagggaagaaaacgatgatattattgtgaatattacagggggtgtacacaccccctgtgatatggtttttaatatacaggttggaaaaggatgatattactcccaatatcacaaaaggtgtacacacccccccatgatattgttcttaatacttcggtggggagaaaatgatattagtctccatatcacaggggtgtgaactcctccggtgatattgtttttaatatcaagaggggaggagatgatattgctttcaatatcgctgggggtgtacatccctcctgtgatattgttccttatatccaggcgaggggaaaataatattactcccaatagtacacaccccatgtggtattgttcctaatactcagggggaaagaagataatattactttcaatatcacagggtttgtacacctttcctgtggtatagttttcaatatccagggggaaggtacatgatattactcccattgcagcaaggggtgtacacacctcctgtgatattgttcctaatatccagaagtggtgaggatgatattactcccagggggtgtacaccccacctatgatattgtttctaatatccaggggaaaagagtgtgatattatgcccaatatcgcagagggtgtacacttatcctgggatattgtttctagtatttggggagggaggagaggatgctattattctcaatatcgcagaaattgtacacccccgctgtgatattcttcataataatcagggaaaaagaggatgatattactaccaatattgcagggggttacacttcccctttggtagtgttcctaatatccaggaagaaagaggatgatattaatcccattttccaggaagtgtacacccaccgtgtcatgttgttcctaatatccagcagggaagaggatgatattactcccaatatcggagagggtgtacacttcccctgttatattgtttctaatacccagggggaagaaggatgacattactgccaatatcacagggtgtgtaccccaccctgctattgttcctaatattcaaaaggaaagatgaaaatattactcccaatatctcagggtgtgtacacctctcctgtgatatcgttcctaatatccacaggaagagagaatattactctcaatattgcaggggggtgtacacccccctgtgatattgttccaaatattcgggcggggagaggatgatattagtcccaatatcgcagggggtgtgcaccaacctgtgatattgttcctaatatccatgcgggggaggacgatatcactctcaatgtcgcaggaagtgtacacctctcttgttatatttttcttaatatccaggagggaaaagatgatattactgccaatatcgcagggtgtgtccaccccccttttatattgttcctaatatccaatggaaaagaggatgacattgctctccatatcccagaaggtgtacaacgcccctgtaatattgttcctaatattttgggggaagagaggatgatataacttataatatcacaggaggtgtacaccacccctatgtattgttcctaatatcctttaagggagaggatgatattactcccaatatctcaggtggtgcctattccccctgtgatattgtttttaatatccaggggaagagagtatgatattacgcccaatatcgcagggggcatacaccctctctgagatattgttcataatatatagagggagagaggatgatattacttccaatatcagaggtggggtacaccccccggttatattattcttgatatccaggaggggagaggttgatattactggatatatagcagggagtgttcacatcttctgtgatactgttcctaatatccagaaaagtagaggatgatattactcccaatatcgcagaacgtgtacacctccctgtgatattgatcctaacattcaaaggggagaggatgatattactcaaaacatcacagggcatgtacactcccctgtgatattgttcctagtatccagaagggagcaagataatattactttcaatatcgcagggggtgtacacccctctttggtatgtttcctaatatccagaaggaaagagggtgctattactttccatattgcaaggggtgtacacccccctgtggtatggttcataatatccagggagggaaagggtgctattattccccatatcgcgaggcatgtacaccctgctgcggtacggttcctaatatccagggggaaagaggatgctattacttcccatatcgcggggtgtgtacacccccgtgtggtatgttttgtaatctccgggaacgaagagggtgttattacccctcatatcgctggaaatgtacactcccctgtggtacggttcacaatatccaggggattgagggtgctattactccccatatcgcggggggagtgcacctccctgtggtatggttcgaaatatccagggtaagagagggtgctattattccccattttgcaggaggcgtacacccctctatggtatgttttgtaatatcccaggtaaggggtgctattgagagaagagagcaaaagaccccccccatattgttctgtattattttatactcagtacctgttttaagaagaaacaaggaagcgaaaccaaaggcaggcagcccggcgccaggcaccagatccaaaaccagacccgaaaccaggcctgggccttcctgaccttagcctgaaagttaaaattcaacccatgacctagcaactgatgttatccatagattccagacattgtatggaaggacattgtgaaatttcttgttctgttctgtttcactctgagtactggtgcatgcagcccttgtcacatacccactagattgctcaatcaatcatggccctttcatgtaaaaaccttagtgttgtgagcccttaaaaaggacagaaattgtgcactcaacaagcttggattttgatactctagtctgctgatgcttccagctgattaaaagccacttccttcactacctcggtgtctgtgggattttgtccgcggctcctcctgctacactgtgactccccttatagagaggggtgtacacccccctttggttcctaatatccagcgggggagtaggtgctattactccccatattgcggggagtgtacacccccttgtagtacggatcgtaaaatcaaggagggagagaaggtgtaattatccccatatcacagggagtgtacacccctttgtggtatagtttgtaatatccacgacgggagagaatgctattactccccatatcgtggagggtgtacaccgccctgtagtatggttcgtaatatccggaaggggagaggttgctattactccccatatggtgggaagtgtacacccccatgtgatatggttcataatatccaggggggtagaggatgatattacccacaatatcatagaaggtgcacacccttttgtgatattgtccataaaatccagaaggggagaggatgatattacttccaatatcacagggggtgtgtagccccatatgatattgtttgtaatatcaaggtagggagaggatgctattccttacaatagctcaaggggtgtaaccttcttgtgatattgtttgtaatatccagaaggggagaagataatttttttattttaaaagtaaactttaatgtcaaaaatgcaaacttgagaagggcagaaagatcaaacagaaggctgccacttcacaattggagggttgcacagtggccgggcagaggcgctcctcactccccagacggtgaggcagccgggcagaggtgctcctcacttccgagatgttgcaggagccgggcagaggtgctcctcacttcccagaacagggggctgccgggcagaggtgctcctcactgcccagacggtttgcaggcctggcagaggcactcctcacttcccaaacggagcagcggcaagccagaggcgctccacacttcccagatggtggggcagccgggcagaggcgatcctcacttctcagagggtagggcggcccagcagaggcgctcctcacttcccacatggtggggcggcaggctagaggcgatcctcacttcccagacggtggtgtggccatgcagaggtgctcctcacttcccagatggtgtggccgccgagctgaggcactcctcacttccctgacagtggggcggctgggcagaggcgctcctcacttcccagacacttggactccgggcagagactctcctcatttcccagatggtggggctgccgggcagaggcgctcctcacttcccagacggttcagaggccgggcagaggcgctctggggagaggataatgttactcccaatatcgcagggggtgcacactccctgtgatattgttccgaatatccagagggggaaaggatgatatagctcccaaaatcgtggggagtgtacacccccctgtgatcttgtttgtaataccaagaagaaaagagaatgctattatttccaatatagcagggggagtacaaccccctgtgatattgttcgtaatatctagggggagagaaaattatattagtcttaatatctcaggggacgttcatccccctgtaatattgttggtaatattcagaatggagaagatgatattgttcttaaaatacaggaaaaaatatgataatattacttccaatatcgaagggggtgtacactctcctgtgatattgttcccaatatccagaatgaaagaggatgctattactcccaatatcccagggagtgtacacccctttgccatattgttcataatatccaggggaagacaggataacattactcccaatatcaccgggggtgtccacccactagtgatatttattgttcatcatatccagaaaaggagaggatgatattactcccaatattgcaggtggtgtacggtccctgtgatattctttgaaatatctagaaaaggagaggatgatatcactccgagtatcacagggggtgtacacccccctgtgatattgttcgtaatatccaggggagaaaaggatgatataattgccaatatttcaggggatgtgcacctccctgtgatattgtttgtaatatccaggggtggagaggatgatattactcaaaataacgtaaacatcctgtgtgtacatcccctgtgatattgtttataatatccaggggggtagaagatgacattacccccaatatcacagagtgtacacacccctgggatactgttcataatatccaggcgggaaagaatgaactacttccaatatcgcaggatatgtacacccccctgtgatatatttcctaatatttatgtgggtaaggatattacccccaatatcacagaaggtgtacatcctctttgtgatattattcctaacatccaggaaaggagagaatgatattactcccagtatcgcagggggtgtacaccacccctgtgatattgttgctaatatccagggggagaggataatattactcccaaaatcacaggggacgtacactcctcctgagatattgttcctaatattcatggggaaaagaatgctactactccaaatacagcagagggtgtacaccatccccgtgatattgttttttatatccaaagggtgaaaggctgatattactcccaatatcgcagggggtgtacaggccccccatgatatcattcttaatatccagggaggcaaagaatgatgttactcccaatattgcaggctgtatacaccccccgtgatattgttcctaatatccagagtaagagaggatgacattgctcccaatattgcaggggttgcacgcacgccctgtgataatattactcccaatatcaacagtgggtgtacactcctcctgtgatattgtttgttatatctaagaaagaagaggatgatattactgtcaatatcacagaaggtgtacagccccttgtgatgttgtttctaatatccagcggtgagaggatggtattactcgcaatattgtagggggtgtccaacggccctgtgatattgtttctcatattcaaaaaggaaaagaataatataactccaaatatcgcagggtgtgtacacttccctgtgatattgatcctaatatccaggaagagagaggatgatattaatcccaatatcacagggggtgtacatcgcttctgtgatattcttcctaatatccagggggggaggggatgctattactcttaaaatcgcagggaacttacactcccactatgatatttttcctaatatccaggaagggagaaaatgatattactcctaatatcacatatcacaatgggtgtacatctccccgtgatattgtttctaatatcaaggatgggagaaaattatattactctcaatatcgcagggggtgtgcacacctcctgtgatattgttcctagtatccagcggaggagatgatattactttaaatattgtagaaggtgtacaacccccctttgatattgttcctaatatccagggggaaaggagatgatattactcctaatatcgcaggggctgtacaaccctatgtgatattgtttcttctaatatccaggggtggagaagataatattactcctaaaatcgaaggggacatacactccccctgtgatatttttcctaatatccagaaggaaagaggatgatattactcctaatattacaagaaatgtatacctgtcctgtgatattgttcctaatatccagaggggtaaatgattatattactcccaatatcgcaggggtgtacaccttccctgagatattgtttctaatatgcagtggaggagaggatggtattactcccaacatcacaggagatgtaaactccccttgtgatattcttcctaatgttcaggacgaaggagggtaatattactcactgtattgcagcagggggtgtagagccccctgtgatattgtttttaatattcaaggttggagaaaataatattccttccaatatcgcatggggtgtacacccttctttttatatagtttctaatatctggggggagaggatgatattactcccaatatcgcagggggattacacccccactgtgatattgtttttaatatccagggtgggagaggataatattactccaaatatcccagggctatacaccctccgtgtgatattgtttctaatatccagaggaagagaagatgatattactcccaatgtcacagggtgtgtacaggccttctttgatattgttcttaatatccatgagggagaggatgatattactcccaatatcgcaaagactgtacaccctttctgtgatattgcttccaatatccagggagggagaggatattacactcaggatcacagggggtgtacaccccaacctgtgatattgtttctaatatctagggaaaatgagggtgatattactatcaatatcacaggaggtgtacactcccttatgatattgttcctaatatccaggagaatgacaggataatattactcccaatatcgcgggtggtgtctccccccactccgtgatattgttcctaatacccagagggggagagaatcatattactcccaatatcgcaggggatgtacacctacatccggcggagtagaagataatattactcacaatatcgcaagaagtgttcaccttccctgttatattgttgctaatatccagggagtgagaagatgatattactttcaatactgagcgtgtacactacccctgtgatattgtttctcatatccagtagaggagaaaatcatgttactcccaatattgcaggggtgaacacctcctttgtgatatttttcctaatatcaggaaagggagagtatgatattacccttaatattgacaggggtgtacacccccctttgatattgttccaatatccaggggggcagaggataatattattcccaatatcgcagagggtgtacaccccccgtgatattgttcctaatatccagagaaataaaaaatagtattatttccaatatcacagggcgtacattttccctgtaattttgttcctaatatctggggggtggggtggcaggataatattactctcaatattggagagggtgtacacccccctgtgatattgttcctaatattcagggtgggagagaatgatgttactcccaatatctcaggagtcgtatacacccccttgtgatattttttctaatatccaggaggcagaggatgatattgctcccaatatcgcagggggtatacacccgagctgtgatattgtttctaatatgcaatatgggggaaggatgattttactttcaatatcgcagggaatgtacactttccttgtgattttgttcctaatatccaggggtggagaagatgctattactatattactcctcatatcgcaggcggtgtacaactccctgtgatatggttcagaatatccagagtgaaaaaggagggtgacattactcccaatatcgggggggtgtacacccctttgtgatgtggttggtaatatccaggggggcagatgagggtgatatcactccccatatcgtggaaggcgtccacttttttgtgatgtggttctttatatcccgaggggagaaggtgatattactccccatatcgcgaagggcatacacccccctgtgatatagctcataatattccggagagtggaggaagatactatgccctatatcgcgggtggcctacaaccccctatggtttggcttataatatccaggggggagagggtaatattgctccccatattgtggagacgtacagccccctgtgatatggtttgtaatatctttggggggcgagggtgatattactccccatatcgcggggagcatacacccccgtgatctggttcatagtatctcaaaggaagaagttgatgtgtacaacttaagggaaaaagttgaagtgaagtgtacacacgccctgtgacgtggttcataatatccaggcgggggagaggagagtgatatttactccccatatcgcgggtgttgtaaactcccctgtgatatagttcataatatccaggggagagaggagggtgatattgctcctcatatcgcgaagggtgtacaaccccctgtgatatggttcataatatccagaagggtagaggacgatgatattactccacatatcttgggaggtgtgatatggttcgtaatatccagcgatgagagaatgatattactccccatatcgcaaaaggtgtgatagggtttgtaatatcctgagggggagagggtgatattaatccctatattgcagaaggactacaccctcccatgacatggtttgtaatatcccagggggtagagtgtgatattactttccatatcacagggggtgtgatatgattcgtaatattcgaagggggagagggtgacactactctccatatcacggggtgtgtgatatggttcttaatatcccaggggttagaggttgatattaccccctttttggggggtgtgtacaccccctgtgatatggttcgtaatatcccgggggagacagggtgacattattccccatatcgaggggatcgtacaccccctgtggtgtggttcataatatccctagggggagatggtgatattactccccatatcagggggcgtgcactcttctgtggtataattagtaatatccagggggcagaggtcgatattcgtttccatatcatgaagggagtacacttccctgtgatatggttcctaatatccaggggggagagggtgatattattccccatattgcggggggacatacaacccctgtgatatggttcataataaccagaaaagaagagggtgatattaatccccgtattgcagagggcatacaccccccctgtgatatggtttgtaatatctaggggaggaaaaggtgatattactttccatattgctgggtgcagacacccctttatgatatggttcataatatccaagttggagagggtgatattacttcccatatcatgggaggtatacccttccctgtgatatggttcgtaatatccagaaggggagagattgatattactccccatattgtggggggcgtacaccttcctgtgatacggtttgtaatatctaggggatatagtgggtgatattactcaccatatcacgggggttgtaacatggtttgtaatatccaggggaggagagggtaatgttactccccatatctcggggcatgtacaccctcctgtgacatggttcgtaatatccaggtcgggagagggtgatattactcctcatattgccgggggtgtgttatggttcataatatcctggggaaggaggctgctatcactctccacatcttgggggatgtacactctcctgtgatatggttcataatatccagggtgggtgagggtaatattactccccatatcgcgggaagtgtacatacccctgtaatattgtttgtaatagaagagagggtgatattactccccacatcgcgggtggtgcccacccccctgtgatatggtttggaatatccagggggatgaggagggtgatattactccccatatctcggtgggagtacatccctctttgatcaagttcataatatccaaaaggaaacaggagagtgatattactccccatatcgccgggggtgtacacgggagggggagtacacccccggcgatatggtctgtaatatccagggaaggagaggagggtgatattactcaccatatcgcaggtggtctacatttacctgtgaaacagtttgtaatatccagggggggaaatgagaatgattttttttttttgagtctcactgtgtcacccaggttggagtgcagtggcacgatcttggctcactgcaacccccgcctcctggactcaagcaattctcctctcccagcctcctgaatagctgggactacaggcgcaccccacaacgtctggctaatttttgtatttttattagagacggggtttcaccatattggccaggctgatctcgaactcctgaccctgtgatccatccgcctcggcctccaaaagtgctgagattacagatgtgagccaccacgcatggcccaaggagaacgatattactccccatatcccagggggtgtatatccccctgtgatatggttcagaatatccggaaggaaagacagggatattacttcccatatcgcaaggggtgtgacatggttcgtaatatcccatgggggagagggtaatattactcttcgtattgtgaagggcatacactcccctgtgatacagttcataatattccggggagtagaggaagatattatgctccatatcgcgggtggcataagccccctgtggtttggttcataatatccagggaggagagggtaatattactccccatattgtggggacgtacaccctcctgtgatatggtttgtaatatcccagaggggagagagtgatattactccccatattgcagggacatacacccccctgtgatatggttcaaaatgtcttttttttttgaaggactggttctttatttcaaaaagacacttgtcaatattcattatcaaaacagttgcactattgatttctctttctcccaatcggccccaagtagaccacatcaaaggagagtacatattaagccaataagctgtaggatgtacacctaacagacctcctagaaaccttaccagaaaatggggacagggtagggaaagaaactttaaaagatcaacaaactgccagcccacggactgcaggggctgtcacagccagatggggtggccagggtgccacaaacccaaagaagcaaagtttcaaaataatataaaatttaaaaagttttgtacataagctattcaagatttctccagcactgactgatacaaagcacaatgagatggcacttgtagagacagcagcttcaaactcagaaaagggtaatgagatgagtttcacatggctaaatcagtggcaaaaacacaatcttctttctttctttctttctttcaaggaggcaagaaaagcaattaagtgctcacctcaacataaggggaacatgatccattctgtaagcagttgggagggggtagagatggaacaaaattttggtctcagaggtcttgccatcttaatttggtcacttctaatgaaaaaaataaaaaatagaaataacattatccaaaggtatcttaaagctgaaaacttgaacagcacattttttgttgttgttgtttggctaactcctcctggaaccacctttctggcttagctagtactttgtacagagcaatgaggcttcccatagtggagtctccctgggctctgtttggctctcagcaaggcaggcctataccttttcctctcctccatggagagaggaatatgcattaaggtgaaaaatcaccttccaaaagtgagaaagggattcgatcgctgcttcagggctgtggtattatatggaatgttttacaaaaggttgctacaaaacaacaaaagaggtaattacaaaatgtgtacatcacaacatactttttaaagacattatgcattgtgctcacattcccttaaatgttgtttccaaaggtgctcagcctctagcccagctggaatctccgggaagaggcggacagtttggtgaaaaagacacagggaaggagcgggcggcggaaggagggggcggcgaaaggagaaagcagccttccagttaaagatcagccctcaattaaaggtcagcttcgggcaggctggcctcaggcggagtctggttcagagggaggagcagcagcagggtgagactgaggcgttctacatctcattcaggtcaagcagagtctggtccagcatcctttgtgtacagaggtgctcccctttggtgcatttcagtttatcttccaagtcatcaattgtcttttccagcttggctaccgatctctcagcaaactcagcatgggtctccgcctcctttattttatcagtaagaatcttgatctcttcctcatatttgtcttctttttgagagtacttttcttcagcagcactcagacacttcaggttctggtccatcagtctaatctgctcatccatctctcggcaaagggattctgccagctcagctcgttcctctgtgcgttccaagtctccttcaatgatcaccaacttacgagccacctcttcatacttcctatctgcctcttctgcaatgtgcttagcttctctgagttggatttcctggagttccatcttttcttcatcttttaaggcccggttttcaataaccttcttacctctctcactctcatcagcagctttttccgcttcttccagcttttgcagggcagtagccaggtgctcctgagcacggtccagctcctcttcaaccagctggatcccacgttcaaggaggccacctcagcctcagcctgttcccgggcccacctttctccctcaacttctcgctggaggcgctcagctcgctcctctgcatcatctgcctgctgctgcagaacctggatcttgcgcttcaccgcctcgatggtggtgatcccagccatggtgcccacccagctactgctagagctccggttcctgcctcctccgatcggcgttgcagcctcctctcacccttacttccgcctcggttcaaaatatcttaagggaaggagttgatattactccccacatcacgggaagtttacatcccctggtgatatggtttgtaatatcccagggtggatagggtgatattactctccatatcgcgaaggagtactcccccctgtgatatggttcataatatccttggggggagagtgtgatattactccccatatcgcgagggccatatactcctttgtgacatggttcgaaatatcccggtgggggagggggtagagggtaatattactccccatacagcgaagagcatacgcccttctgtggcaaggttagtaatacttcagggaaaagagtgcaatattacttttcatattgcagggaacatacactcccctgtgacatggttcgtaatatcccgggggctgagagggtgatatttctccccatatcaccgggggcctacacctgggtgtgatatggctcataatatacagggagggagagggtgatattactccacataccgagtgaggggttacacaccctcgtgacatgttcgaaataccccaaggaggagacaatgatattactttccctgtcgcgggggctacaccctcccagtgatatggttcacaatatcccggggtggagagggtgatattactccctatatcaccggggggtgtacacttccctgggaaatggtttacagtatccccggggggagagggtactattactccccatatcacgttacatatcagggtacacccccacgtgatatggtttgtaacatcccaggaggaagaaaatgatattactccccatatcgcggtggcatacacccctccccgttaaatggttcataatatcttggggtggagagggtgatattactccccatatcacgtggggcatacaccccactatgatatggttcataatatcccggaggggagagggagatattactctccatgtcgcggggggcatatacacccctgtgatatggtttgtgatatcccgggggcggagagggagatattactctccatatcgtggggtcgtacacttttctgtgatatgattcgtaatatccagacggggagagggtgatattacttcccatattgcgggggcgtacacccctctgtgatatggttcataatatcccgaagaaaagagggtgatattactcctcatatcgcggggaacacacaccaccctgtgatatggtttgtaatattcagcgggggagagagtaatattactccctgtatctcggatggcgtacactcccctgtgatatggttcataatatccagaagaaaagagggtgatattactccccatattccagggaatgtacaccaccctttgaatatggttcgtaatatccaggaggggagagggtaatattgctcccaatatcgaaggaggtgttatacggttagtaatatccagagaaggagagggtgacattactccccacatcgtggtgggtgtgcacccacctgtgatatggttcataatattcaggttaagagaggtgatattgctttccatatcgccaagggtgtacactcccgtgaaatacagttcgtaatatccaaaaggggagagggtgatattactcccatatcgtggggggtgtacacccctctgtgatatggttcataatatccagggtggaataaggtggtattactccctgtatctcggggcatgtacatcgcctgtgatatgattcataatatccagaagaagagagggtgatattaatctccatattgctgggggtgtacaaccccctgttgtatggtttgttacactgagttggggagagggttacattactctcaatatcgagtggggcatacacacttatgtgatatggttcataatatcccagggaggagagggtgatattactccccatatcgcgggaggcatacaccccaatgtgatatggtttgtaatatctacatttttttttttgagacgaagtctcgctcttgtcccccaggctggagtatgatggccggatctcggctcactgcaacctcagcctcccgggttcaagcgattctcctgccttggtcccccaagaagttgggattacaggcgcacaccaccacgcccggctactttttgtatttttagtagagaaggggtttcaccatgttggccaggctggtctagaactcctgacctcagatgatccacctgcctcggcctcccaaagtgctgggattacaggcgtgagccactgcacctggcctggtttgtaatatctatgaagggggaaggtgatattactttccatatcacgggaggcgtacaccacgatgtgatatggtttgtaatatccagggggtatactgggtgatattactccccatatcgcggggagtgtatacccttttgtgatatggttcctaatattaagctgaggagaaggtaatattactccccatatcgcaggggtttttatatggttcataatattcaggaagagagagggtgacattactctccatatcacggggtgtgtactcccccatgtgatatggtttgtaatatccagggaaggagaggttaatattactccccatatcgcagggggtgtacacctctctgtggtttgtaatatccaaagggaagaggatgatattatcttcaatatcttggggggatacagtccccagtgatattgttcataatatccagagggggaggggatgatattactcccaatattgcaggtggtgtacaaccccctgtgatattctttataatatagagggggatgatgatattactcccaatatagtaaacaacctgtgtgtacaccccctgtgatattgtttataatatccaagggtggaaaggatgatattactcctcatatcgcagggggtgtatacccctctgtgacattgttcctaatattcaggggaggagaagatgatactactcctcatatcacaggggatgtacacccccctgtgatacttttggtaatatccaggggaggagaaaattatattattccccatgtcacagagggtgtacaccccgctgtgatagtgttcataatatccaggtgaaaagaggatgatattactccgaatatctcaggaagtgtacacccttctgtgatattgttcataatatccaaaggtggagaggaggatactactccccatatcgcagtgggtgtacacccccctgtgatatggttcataatatccaatgtaggagaggatgatattactttccatatcgcggagagtgtacatccccctgttatattgtttgtaatattcagggagaaagaggatactactactccccatatcacacggggtgtatattcccctgtgatatggttcctgatatccaagagatattataatcctctcttggattatgctacctctcatatcgcatggggtgtacacacactttgtgatatcgtttgtcatatccaaggagggagaggattatattaatcccaagatcacggggggtgtacaccctcctgtgatattgtttgtaatattaaggggggagaggataatattactcccaatataattaacaccctgtgtgtactcctccttgtaatattgttcataatatccaatgggggagacgatgatattactttcaatatcgcagaggatgtacatccctttgtaacaatgtttgtaatataaaaggcaagagaggatgatactacttccaaaattgcaggacatgtacaccccccggtgatattgttcctaatatccagtggggaagaggatgatagtagtcccaatatcgcaaagggtgtacacaccccctgggatattgttcctaatataaaaggaggagaggatgctattattcccaatatcacagaaggtgtaaaatcccctgtgatattgttcgtaatattcaggaggggagaggattatattactcccaatatcacagggtgtgtacacagggaggggcaagggccagaagcgggcgggaatccccatgtttgggcggacccagtttctaatggccagcatttgccaatcaaagcttaccagagaactctaaaagccagggctttcctgctagacaagactcatttctggaactgctttaaaaagaaacaaaacttcccaaggaccccttttcctctctgtctgcctaaaataatgttttaaaaactcctaaagcagctgaattcagcccccttcctgggggaatgtatagacggaactcccacctttcccggcatcccaaggccagagtatgtgaaactcctgggtctctatgtgtgtctgagcggctgctctgccaacactccacacagccctgtgtcctggacccaaggcccttatgacctgagctcaagaggggatctcctgatccatgggttgcaaagatccatgggagaagcatggtttctggggcggggtcacacgctcagtcactgtttccctcggatgccggagatggttcctttggctctctgccaatacagggtgaatcatcatccatccctcttttctttgttctcccgggtcaagttgtttgcctagtcagtcccaatgtgagaacctgaatatttcagttgacgcgctgacttcaaaatccccgggcttcgggaggcggagcttgcagtgagccgagatcccgccactgcactccagcctgggcgacagagcgagactccgtctcaaaaaaaaaaaaaaaaaaaaaaaaaaaaaagtccccgggcttttcttttcactcagtggaaggcagctgcttctaattggccatcttggcccgcccccaccacgtgaccttctgtaaaatgcctccactctccaggaacgctctcattatataactttgcctgaaaccaacagcacgctcattgcacatatcatgggctcatttatttcacttataaagaacctggccaaggaagagatagtgcctaaagtggccagtattctgaccgatatgttagaaaaatggtgtgccgaccaattcatgacatgtgtcccaaaactagcaacggaaattgtattcgccgtgttgaggtctctaatccagatgatgctcatctatgtactggaaaaggcagagtcctttcctgacaagctgctgaaactcttcagaaacatctcatatttcctgaagaagatgatgtctggacaagcagcacaggtcgttcagatttaactttctattcatatatccagcacgatattcgcacaattgtcacgaaaccttaccagttgatgagtcctgcacatttcctttaatttcaggaggaagagggtaatccggatgagttttctgacctactctgctgctgtgattaaacaaccaccaggaaattttgacgacactgttctcctgagctcctccctttcctccgggaacaaaacaattgaatttacaaaaataaagtgttatttgactggagtgaggtctcatgtctgcttatgcggtggctcgctgctcagaacagggtgagtctctgggttgtgtgctgaggaggggaggctctcaatctggagaaaacccactgcaggggacacctccatggggtctgagggactgaggatgaggagccggactgggtctagggaaggaggaggtttcagagggtgaaattctggcactaaagcctgggggtgtttgggaacttcctccttccgaagaagtttcagggagggataaagacaaaccctgggctccttgaggggcccttactaatttgagaggactctatcgggaaggagagtgacaatggcctccttgaggactgaggcccctgaataaatgaggcccagatacagtccatgggggatgagaccttcaagggtcacattttggttgggacagaggaaaagtgcagctctgcagccgcagaggaaaacccggcagtgtgaaagcgaccttggaggggccctgtgcgctctgaatgcgtctgagcccccatcccctgtccccgcctctctttctggattcttccagctcggctgtctccgccatcttctgagcgctccaccctgacttattcaagtttcccttctgccttccaagtactccaaaatctttcagatctgtgtccctacccctgtttttagcatgtgttggggctccaggtccctgaaggtttctggcctgaaatccacctccccagcggagtggactgcgttctagagactccacactccgcgaggttcccaggcccctgagggacaaccgagtggcctgcgcacttcagggctccacactcggcaaggtctttcaagcccttggggtccccttcttagttttttccacctttctgggctgcagtcactccataaatgctgggatctgatccccacccccactctcgtttcctcaattctgcgggctacacgctctggcaaggtcctccgggccctggatcccctccctctccctatgcccacgctcctagtcagcccttctggggtccactattttcaggaactaaccgttctcatggagccttgctaaccggaaagctgtgtggaagaaaggctttgaggatagaggtggagatttggctcttccatagtgccactcacccaccccaccatgctgccactgccagacccggacccctgtttcagaacaagtgaccagattcgctcctggacagccctggacactggccttttctctgaaaactactcaccctttctctagtccccacttcatgccagcctcataccctcttccttcccccacgctggcttccgggatcctcctctgctcagacaacctcttctgtgtcccacccccgtttttagaatgctttggggcaccaggttgggggaaggtttctggcctgatatccatctctttccaaactcccttcttcccttgaaaggcttcttgccttcagccccacttctggctccgaggtttcaggacaccctcctcttcatcctcattcttttgaccaccagctttttaggaattcgaacgtccctctcatcttcgtgaatcctgtccaggcatttgttgaccccttcatctgatacccctgacctcacattgccaaaagtctacccctacccagtacactggaattagacaaaatcccaggagttttacctcaactctgagtgtgcccacaggagctctccctgaagccacgtccttttaagcagggtctagggttcctcccttgtcttaatgaactctttgtcacacggaggacgttatggagcccttatgatctttcactgcctttctgcccagcgttttgtctttccatggacatttataatattttccatggacattttgttctctcaatgtccacccctaatttccaacatcccaaagattctcatgtgtttcctgaaagccatttacaggaatggctgtgcccagacccccttccccaggatcctccttcacacctggtaggtgcctctcctagagagatttgcactcagttgtcgtgcagtcacatggcccagatggttgttaatcacccccttcctggcaacagctagcagccagggaatcactggcacagaaacctcagggtgaccaagatgaggccacctctgtgctgaaggctgtgctccagagcctgcttgggatcaggcttaagcaggtcttcagccagacctgatgttacctggtttccttgagctgccctgcctgagctatcgggagcactccctcaatgcacatcttgattccctatctcatgctctgcttctagaaaccatgagctatcaattgctactggcaatggtcctgggaagtcaaccctaagtatggattctggggttggatgactccccacaggacttcagtgagcaacaatcactgctggcagttggaggacagagtcgctagggcatgtgaccactgtgaaaccaccgatgtttcacctggggtaattttggatgaactacggtagaagcactgaaggtacattgcttttggtttggaagattgtaggtaaataatagcgatatgaatgtggaattggatggctgcaaacgagtgccattgatgcattgaaagaggaaaagtcaggctgtcacctgtcactcagcaatttaaagtgtgagagttgggactagatgtggtggctcacatctataatccagagattcgggggaagcttgaagaggtaggatcttttgagtccaggagttccagaccagcctggacaccagagcaagacctcatctctacaacaaaattttcttaaaaattagatgggcttggtggcacgcacctgtacttgtagatctagctaatggggagcatgagataaaaaaatcacctgagtcagggacttaggggttacaatgaggtatgattgtgccagtgcacacactcccacctggccaacagagtgagattctgcttccaaaaaaataagaaataaatcaggtttgagagttggaaagcatcatcttctcctagagccaaaggacatgtacaactgagacccaggaacaaagcttcatcacaaagagaccatcatcagtggagccgggagatgcattccccctcaccctgccttgaggaggcagtggagtcatctgtctgggatcctttctgacccagccctatttgtttgtctctttggcttctttggatttgtatattttagctgttataacactgtaaaacaaacagagtgatttttttgagttgtgtgaatgatgctagctccatagtcaccctgagagtgatgggaacttttgaatttgtggcaagttggagggtagtgtaagtgacctgagattgccaaattggggctagcactggatgtgaggttaggctagtggaaaaatatgcccagaaccagaggagtgtgggctcactgcaggtggttaggctcagatccaaattgtacagatggatagctttggggtaaagaataacatagttgagaagtgcatgtgttagtctgttcatgcactgctataaagaattacctgagactgggtaattatttataaaactcaggtttaattgggtcatggttccacaggctgtacaaaaagtatgatgctggccatcagctcaacttctggggaggccccagaatagttagagtcatggcaaaaagtacaagggaagcaggctcatcttccacggccagagctggagcaagtggtaggagaggtgatacacactttcaaacaagtaggtcttttgagaactccatcaccggacagcacctatgggatggtgctaaattattcatgaaatatccgcctccataatccactcaactgtcaccagcgcagccagccccacctccaacagtggggattacaattccatatgaggtgtgggtggggacacagctccaacctcaatcagtgggcatcctggattgggtctactatagaaggagaaccaggagctgactatgatcttgaaccctacccatgatggccgggcggggtgactcatgcctgtaaccccagcactttgggaggctgaggtgggtggatcgcctgaagtcaggagttagagaccagcctggccaacatggtgaaaacctgtctctactaaaaatacaaaaaattagaccggcgttgtgctggatgcctgtaatcacaccactacgctccagcatgggaaaaaataccaaaacttcgtctcaaaaaaaaaaaaaaaaaaaaaaaaaaaaagactgcccatgaccactgcaccagtgagagggacaccagcatcactgagatgcaagggctggacattcttcataggtcagagctcaaagcaggggacactgatacagagatgggctccatccatagcaccaaagtggtgagaggatgtgggaatggcagaggccagcactttgccatcaatgcaagggggtataaggaggtgacaccagtgccagagtacatcacggggggactgccctacaatatctaggacttacctcttagagcgtgtttcattagcgacaacagatataaatggcagacaggtgtgtccctgcattaacaggaaatagaaatcatcaagaggaacagaaggcagatgtcagcagccccttagaaagtcatcatccttcatacagttaaaatctgagacagttctcacacgagaaggcctaactcaaaaagaggctgggttctcatgaggcaggtttatgcaaaaccaaggaaggtgtacaagtttggaattctccagtttcccttggaaaagacctacagtcatttgcttaggtaactgagcactgaacaaaggtgagtattgttgtcttttagaagctcttggccaagaaggccttgttggcataaaacccatggtttggaaacatcaccatgacccctgttagagtaatggcctaagggtgggggtcaggaaattgatgtattccttgccaacttctgcctctaagtgagtgaactctgtttgtgaacctctctcctctgtggttatgttcctaggctctcatgtataatcaggagtcatagacttagaaacaggaaaaatacttacagtgtttttgtggcctgtgagctatgacttataattttaggaaaaaaacaattgcaaatggaaagcctaagtctatcaatgctcatccaagacaacataatcaataaaaaccaatatcaaatctcaaggcaaattatttcctgtatatagatggcagagatgagcaccaccatcaaaaactcaaggaccagtgctgtgggtccagtcatctgtttcatggaattcaccagtctggtatcttcaaaatccagaaggatgatggcagatggcaggaaagtaatgcaaacgtcatcaggtgtgaccccactgtagcagctgtgatggatgttttctctcaccatagcaataaataacacaacctcggtcacactgtatgcattgttggtctgcaaaatccatgttttgcaaaactcttcaggaaggtggatctgtaatattggcattgacatgagaacaacagcagtatttattcacaatctcaagctctctgtcttcccgtctctctcattagccatccaagtagtcctgaggaaccaagcccatcagaacattctgcaacataatacacagctccattctccattcaaattttgttgttgttgttgttgttgatgagacaacatcttactccatcagccaggctgacgtacagtggggctatctgggctgactgtagtcttgagcttccaggctcaaggcatcctctcacctcagcctcctaagtggcttgaactacagacacacagcgacatgctgggctagtttttgtatattttgtagagacgtgctctcaccatgttattcaggctggactcaaactcctgagcgtaagtgatccaagcaccttggcctcaaagtgctgagattacaagcctgagccactgcacccagcccaatctccattctactgataacaatgtcattaccaggtctgatggacaggaaatggtaaggtttctgaaaacctaaggatcacacagcgagttccaaaggctgaaagtgcatacctgtcgacactgataccaatgacatccaatggtgagaatgacattccttgtagtcctagctctgctcataacaaatctatactgaagtgtaagagtttgatggtcatggggattttccatgtctctgcctttcagcgatgtgccatatctgtgaagtgttcagaaatgcaacagcctgaggcatgctgggcatatcctctaataaaaaggaaaatgccattttatggtcctgtatttctacaagttggaacacatgggcctgtgatccagatgggggaaatgggaatattcccactcattcaccttcatccacgaagcccatttgaaagctttgggcttcccatccttgtagattttagtgttgtgggctgggtgcagtggctttcacctgtactgccaacactttgggaggcctagacaggtgaatccactgaggccaaaagttcgagaccagcctggccaagatggtgaaaccccgtccctactaaaaatacaaaaattagcaaggtattggggccagcacctgtaatcccagctgctcgggaggctgaggctggagaatcgcttgaacccaaaaggcagagactgcagtgacccgatcctgcctttgcactccacctgggcaagcagaacaaaacttctgtcttgaaaaaaaaaacaaaaaacgaacaaaaaagatgttagagttctgggtttagaggtctataccccagaaagagaatggtttcaacaagggacaaagaagttgctttaaacgttgacttgccatttcttttcagtgtgtttgttctcttgcgtcaagagaccaccagaaaagtggtgcaattactctcctgtcaagaatcattgactatcatctgcaagagggtcagatcctggtatataattagggcagaaatacttagtctgagaagggtatgacatccagaggccctattaatgatgtccttttctccatgcctgactctgaccccatgtgctggactgcccctgtgtggatggcctcatggcctgctcggactctgaggtcccaccccaagtggcacctccatggagggctctactcttgtatgggctctgacactcacactgagacactctcccatggacacctcttcacccacttggggtctgaaactgggctactccatccctccctaacctggaacagagagctttcactgctattacacaagtcatagaggctaactcctcatttttccaagctaattattgaaacattagtcctgggttgataagacaagataagttaacttttcataaatttgcttatcaagttttgaataaattcaaataaattcaccttccccacacaccttagttgtcgacatcacacgcgcacccatactcacagggtgagcacgaaggcttcactgtcagtggagaaagtggcaaaacccttctgtgcctcatcctggtctagacctggccctcatcctttcccactcttcccctcactcccttggattcatccacactggcctcctgcctgctgctccacctccctgcgaagctcacccctgcctcagggcctttgcacgtgcagtggcttcaagccatatcctcttcacccagatctcccagatctcctgaatgatcttcttttatcattcaggtctcagcttgcatgtaatcttctcagtgaggattacccaaaccacatagttcattcattcattcaaatattcattcaatggcatattgacaaagcagctacttcatgccaggccttgggccaggtgttatggatatggcaacaaacaaaacaagagttttctgctctcaaatttttacccacttaaaggagatatcatacatcatctgtaaataaatacatcatctgtaaataatgatgtaaataaatacatcatctgtaaatctgtaaataatgatgtaaataaatacatcatctgtaaataaataaagtataataaaagaaaatagtaggtttttttggttggaggtgaccgtgaagtttgcaaataccatcttacaacacattattttattttatttcatttcatttttaattttattattattatactttaagttttagggtacatgtgcacaacgtgcagatttgttacatatgtatacatgtgtgaagttggtgtgctgcacccattaactcgtcatttagcattaggtatatctcctaatgctatccttcccccctcccccaccccacaacagtccccggtgtgtgatgttccccttcctgtgtccatgtgttctcattgttcagttcccccctatgagtgagaacatgcggtatttggttttttgtccttgtgatagtttgctgagaatgatggtttccagcttcatccatgtccctacaaaggacacgaactcatcattttttatggctgcatagtattccatggtgtatatgtgccacattttcttcatccagtctatcattgttggatatttgggttggttccaagtctttgctattgtgaagagtgccgcaataaacatacgtgtgcgtgtgtctttatagcagcatgatttataatcctttgggtatatacccagtaatgggatggctgggtcaaatggtatttctagctctagatcactgaggaatcgccacactgacttccacagtggttgaactagtttacagtcccaccaacagtgtaaaagtgttcctatttctccacatcctctccagcacctgttgtttcctgactttttaatgatcgccattctaactggtgtgagatggtatctcactgtggctttgatttgcatttctctgatggccagtgatgatgagcatttcttcatgtgttttttggctgcataaatgtcttcttttgagaaatgtctgttcatatccttcacccactttttgatggggttgtttgtttttttcttgtaaatttgtttgagttcattgtagattctggatattagccctttgtcagatgagtaggttgtgaaaattttctcccattctgcaggttacctgttcactctgatggtagtttcttttgctgtgcagaagctctttagtttaattagatcccatttgtcaattttggcttttgttgccattgcttttggtgttttagacatgaagtccttgcccgtgcctatgacctgaatggaaatgcctgggttttcttctagggtttttatggtttgaggtctaacatgtaagtctttaatccatcttgaattaatttttgtataaggtgtaaggaagggatccagtttcacctttctacatatggctagcctgttttcccagaaccatttattaaatagggaatcctttccccacttcttgtttttgtcaggtgtgtcaaagatcagatagttgtagatatgtgacattatttctgaggactctgttctgttgcattggtctatatctctgttttggtaccagtaccatgctgttttggttactgtagccttgtagtatagtttgaagtcaggtagcatgatgcctccagctttgctcttttggcttaggattgactttgcaatgcggggtcttttttggttccatgtgaactttaaagtagttttttccaattctgtgaagaaagtcattggtagcttgatggggatggcattgaatctataaattaccttgggcagtatggccattttcacgatattgattcttcctacccatgagcatggaatgttcttccatttgtttgtatcctcttttatttcattgagcagtggttttagttctccttgaagaggtccttcacatcccttgtaagttgggttcctaggtattttattccctttgaagcaattgtgaatgggagttcactcatgatttggctctctgtttgtctgttattggtgtataagaatgcttgtgatttttgtacattgattttgtatcctgagactttgctgaagttgcttatcagcttaaggagattttgggctgagacaatgggttttctagatatacaatcatgtcgtctgcaaacagggacaatttgacttcctcttttcctaattgaataccctttatttccttctcctgcctaattgccctggccagaacttccaacactatgttgaataggagtggtgagagagggcatccctgtcttgtgccagttttcaaagggaatgcttccagtttttgcccattcagtatgatattggctgtgggtttgtcatagatagctcttattattttgagatatgtcccatcaatacctaattattgagagttttcagcatgaagggttgttgaattttgtcaaaggccttttctgcatctattgagataatcatgtggtttttgtctttgggtctgtttatatgctggattacatttattgatttgcatatattgaaccagccttgcatcccagggatgaagcccacttgatcatggtggataagctttttgatgtgctgctggattcggtttgccagtattttactgaggacttttgcatcaatgttcatcaaggatattggtctaaaattctcttttttggttgtgtctctgcctggctttggtatcaggatgatgctggcctcataaaatgagttagggaggattccctctttttctattgattggaatagtttcaggaggaatggtaccagttcctccttgtacctctggtagaattgggctgtgaatccatctggtcctggactgtttttggttggtaagctattgattattgccacaatttcagatcctgttattgctctattcagagattcaacttcttcctggtttagtcttgggaaggtgtatgtgtccaggaatttatccatttcttctagattttctagtttatttgcgtagaggtgtttgtagtattctctgatggtagtttgtatttctgtgggatcagtggtgatatcacctttatcattttttattgcatctatttgattcttctctctttttttctttattagtcttgctaccggtctatcaattttgttgatccttttaaaaaaccagctcctggattcattaattttttgaagggttttttgtgtctctatttccttcagttctgctctgattttagttatttcttgccttctgctagcttttgaatgtgtttgctcttgcttttctagttcttttaattgtgatgttagggtgtcaattttggatctttcctgctttctcttgtgggcatttagtgttataaatttccctctacacactgctttgaatgtgtcccagagattgtggtatgttgtgtcttttttctcgttggtttcaaagaacatctttatttctgccttcattttgttatgtacccagtagtcattcaggagcaggttgttcagtttccatgtagttgagcggttttgagtgagtttcttaatcctgagttctagtttgattgcactgtggtctgagagacagtttgttataatttctgttcttttacatttgctgaggagagctttacttccaagtatgtggtcaattttggaataggtgtggtgtgatgctgaaaaaaatgtatattctgttgatttggggtggagagttctgtagatgtctattaggtccgcttggtgcagagctgagttcaaatcctgggtatccttgttaactttctgtctcattgatctgtctaatgttgacagtggggtgttaaagtctcccattattattgtgtgggagtctaagtctctttgtaggtcactcaggacttgctttatgaatctgggtgctcctgtattgggtgcatatatatttaggatagttagctcttcttgttgaattgatccctttaccattatgtaatggccttttttgtctcttacgatatttgttggtttaaagcctgttttatcagagactaggattgcaacacctgcctttttttgttttccattttcttggtagatcttcctccatccctttattttgagcttatgtgtgtctctgcacgtgagatgggtttcctgaatacagcacactgatgggtcttgactctttatccaatttgccagtctgtgtcttttaattggagcatttagcccatttacatttaaggttaatattgttatgtgtgaatttgatcctgtcgttatgatgttagctggttattttgctcattggttgatgcggtttcttcctagccttgatggtctttacaatttggcatgtttttgcagtggctggtactgactgttcctttccatgtttagcgcttccttcaggagctcttttagggcaggtctggtggtgacaaaatccctcagcatttgcttgtctgtaaaggattttatttctccttcacttatgaagcttagtttggctggatatgaaattctgggttgaaaattcttttctttaagaatgttgaatattggcccccactgtcttctggcttctagagtttctgccaagagatcagccgttagtctgatgggcttccctttgtgggtaacccgacctttctctctggctgcccttaacattttttccttcatttcaactttggtgaatctgacaattatgtgtcttggagttgctcttcttgaggagtatctttgtggcattctctgtatttcctgaatttgaatgttggcctgccttgctaggttgcagaagttctcctgggtaatatcctgaagagtgttttccagcttggttccattctccccatcactttcaggtacactaatcaaacgtagatttaatcttttcacatagttccatatttcttggaggctttgtttgtttctttttactctctttcctctaaacttctcttctcacttcatttcattaatttgatcttcattcacttatatactttcttccacttcatcaaatcggctactgaaggtattgcatgcatcatgtagttctcatgccatggttttcagctctatcaggtcatttaaggtcttctgtacattgttttctctacttagccattcgtctaatcttttttcaaggtttttagcttccttgtgatgggtttgaacatcccctttagctcagagatgtttgttattactgaccttctgaagcctgcttctgtcaacttgtcaaagtcattctccatccagctttgttccattgctggtgaggagctgcgatcctttggaggagaagaggtgctctggtttatagaattttcagcttttctgctctggtttctccccatctttgtggttttatctacctttggtctttgataatggtgacctagagatggggttttggtgtggatgtcctttttgttgatgttgatgctgttcctttctgtttgttagttttccttcgaacagtcaggttcctcagctgcaggtctgttggagtttgccggaggtccactccagaccctgtttgcctgggtatcaccagcggaggctgcagaatagcaaatattgcacaacagcaaatattgctgcctgatccttcctctggaagcttcgtctcaaaggggtgcctggctgtatgaggtgtcagttggcccctactgggaggtgtctcccagttaggctagatgggggttagggacccacttgagaaggcagcctgtccattcacagagctcaaacactatgctaggagagccactgctctcttcagtgctgtcagatggggatgtttaagtctgcagaaatttctgctgccttttattcagctatgccctgcccctacagatggagtctacagaggcaggcaggcctcattgagctgcggtgggctcctcccagttcgagcttccagaccactttgtttacctactgaagcctcagaaatggtgaacacccctcccccacccagtctgccgccttgcagttccatctcagactgctgtgctagcagtgagcgaggctccatgggcgtgggacccactgagccaggcacaggatataatctcctggtgtgccatttgctaagaccattggaaaagcacagtattaaggtgggagtgtcccaattttcccagtacagtctgtcacgggttccctcatctaggaaaggtaaatcccctaaccccttgtgcttcccggtgacgcaatgccccaccctgcttcagctagccctccatgggctgcatccactgtccaaccagcccaatgagatgaacaaggtacctcagttggaaatgcagaaatcacccatcttctgtgtggatcaggctgggagctgcagaccggagttgctcctattcggccatcttggaatggcaatctatgtttgctttttacatttgaaaaaactggtgtcacgtacctaggtattaatcattgtggtatcctcttgccgatttacctctttatcattaactagtgaccctccttgtcttttgttgttacagtctgtgattttagtctattttatctaatatgagaatagctactctggcacttttttggtttccagcttcatgaaatatccttttccatttccctgttttcatttccctttcggtgtctctatagatgaagttgatttctttaaggcaccataagttgggtcttatttctttatccatttgaccatttagagaatttagaacactgtcagtgttattattcataagtaaaaacttaagagtgggtgtagtggtgtacatctgtatttcctgcactttgagagactgaggcgagctgatctcctggggtcaggagtttgagaccggcctggtcaacatgatgaaaccctgtctctactaaaaatacaaaaattagccaagcatgctggcatgtgcctgtaatccaatttacttgggaggctgaggcaggagaagcttgaacctgggagacaaatgttgcagtgagctgagatcacacagagaagtcatctccactctcctcatcagaacctcttgttcacagcatttgtgagcacaaatcaatgatggttattctttcctactaattagggatattttattacacagcaatagcctccagcaaagggaaccatcatacatgattcctacaagttgacagggctggaattatcactgaaaaactaaggtggctatacttgattcccaatgtccaatttttcatgaatagagaaatttatcctttttccccccagccagaaaccaagttttgctcttacgcccaggctggaatcaagtggcacaatctcagctcactgcaacctctgccccccagcttcaagaaattcaccttttgaacaaggagatattaaggatacactatgtgtatgctaccggtggttgcaggagactcagaaaagagagaaacagtcactggcctcgtgcaactgatattctcgggaggagagaaaggcaatcaagaaagaaacatgctgtatttcagacagctgtaagtcctccacaagaaaagaaagcaggtgaggaacataggaaatgtgtcaaccataaggttcccgctaattctataagttggtcagggatatcctccaagaataagcagcatctgagcaatcacctgaagggaggaaggaaggaagactgtgagtggtggcttacacctgtaatcccagcactttgggaggccaaggagggcagattgcctgagctcaggagttcacgaccactcagagcaacctgttgatacccaatctctactaaaaacacacaaaaaaattacccgggtgtggtggcacgcacctgtagtcccagcttccatgcccagctgatttctctctctccatatatatatatatatacacatatattgtttttgcagagatagggtctcactgtgtcacccagtcatcaagcaattctcttatactgttttggaaaagcatgggaattacaggtgtgaaataccctgctggtcctgaaaaatgtgatatttgggattctctgcctggcttgttttacccaaaataatgacctccagttccttccaggttgctgcaaaagacatgattttcactgttttataactgaatagtattcctgtatgtatacataccacattttctttatttattcttctgttgattgacatgtagggtgattccatgtctttgctactgtaaataatgctgcagcaaatatttgtgtgcattttgatctattcctttgagtaggtacccagtactgcaactgcaggactgagtagttgttatattttttgttctttcagaaatctccatagtgtttgccataaaatctgcactaatttacattcccaacaacaatgcataagatttccccttttctccacattctcactaacatttgttatgtttttgtctttttcataatacccattctgactggagtaagatatctcattgtggtggttgttgatatttttgagacggggtctcactctgttgccagactggagtgcagtggtgtgatcgtggcttgctgcaacctccacctcccgggttcaagcaattctcctgcctcagcctcccgagtagctgggactacaggcgcgtgccaacaggcctggctcattttttgtatttttagtaaagacagggtttcaccatgttggccaggatgatcacagtctcttgagctcatcatacacctgcctcagcctcccaaagtgttggaattacagtcatgaggcagcgcacccaacctcaatgtggttttaatgaccatttctctgacgattcatggtgtggagaatttctttgaaataccttttggccatttatatgtgctcttttaaaaactgactcctgtccaggtgcggttgagcatgcctgtaaccccagaacttcgggaggctgaggccaatggatcacttgaggcaaagaggcagaaatcagcctggccaacaaggcaaaaccccatctttactaaaaatacaaaaaatcagccacgggctgtgactcgtgcctgtggtgcaagttactcaggaggttaaggcacaggaattgcttgaacccggtaggcacaggtcacagtgagccaagatcatggcactgcactacagcatgggtaatagagaaagacctgtctcataaaaacaaatgaataaataaataagataaaaaataaaaaagtctctttatgtcctttgccgactttttaatgggattctttggagttttctgttgtagttgagatctttgtttactctcggtattagtcttttgtcaaaggaaaagtttacaaataatttcttccgttctgcagtttgtctgctcactctgttgagaggattatttctttggctgtgcagcagctttttgtttcagtaaagcttttgaatttatataattaaaattttcagtttggtttaaatttgcactggtcgatttttggttttgttgcctgtacttttgaagtcatactcttgaactctttactagacaataaccagaagagttttctctagttttcttctcacatttttattatttcagtacatatatttaagtctataattcatcttcaattgatttttgtagaaatagtgagaaataggagtccaggtttattcttctgcaaatgacaattcaattgttccagcaccaattattgaaaagggtgtgctttcctcaacgtatattcttatcagctttgtcaaagatcagttggctataaatgtgtggctttctttctgggctctctagtctgttacatcaatctgtgtgtctatctgtatactactaccatgctgtattggtgatgatggctttgtaatataatttgaagtcaagaaatgtgatgctcccagctttgtttatttgcttcagaaaggctgagtcaacagctgcagagatgaagctgcccctcctcgcagggctccttcccggaaaaagatcatggctcccactgaccatataaccatggctggaactcctgaaattcccaaagggaggccctacccagtgaggggggatgaatgaaggtcctacttaaggaatctgtctggccacaatcaggcacagcagctgtgctgccttgtgggggaccagaccacctggattccctggagcctgcaggctagaatgtctgagtccatggaaacacagaaatggaggccgccctcacctccccagaaaactgtagtctcaggcagtctccagccgattgccactggttggctgctattccaagccagtgggtcttaacttgagaggtgctgtggaagtggggcccacggaatgaggctgcttggctccctggattcagccccttttctaagggaatgtacagatggaactcccgccttgcccagctttccaagtatataaaactcctgagtctctgtgagtgtctgagcgagtgctctggcaacattcgacacggctctgtgtatctgacccaagacccttatggcatgagctaatgggaggatcttctgatccatgcgtggcaaagatgcatgggagaaacatggtttgtgggtaggggttgtgcattcactactgcttctcttggctgtaggtgaaggtttctttggctctgtgctgatactgggtgcaccatcacccaccccctttgtttcttctcctgggtcaagtcatttgcctaatcagtcccaatgtaggaacctggatacttcagttcaaggtgctgaattcaccgtgcttttcattcaggggaagacagctgcttctcattgggcatcttggcctgcccacttcacgtcactttttgtaaaatccacaccactccaggaatatccattacttaacttcgcctgaaataaacagaaggctcattacacttatcatgggctcacttacttcgcctataatgaaggtgccatggaaatgctagtggatgacgtggtccattttcttagggatgagatagaaaaatggtgtatggctttttaatttaattaaaatttttagtttggtttaaatttacattggtctctttttggttttgttgcctgtacttttgaagtcttactcgtgaactctttactggacaatgaccagaagagttttccctaagtttcttctgatattttgaccatttcagtacatacatttcagtctataattcactttaaattgatttttgtaaacatggtaagaaataggagttcagatttattcttccgcatatgataatgcaactgtcccagtaccaattattgaaaagggtgtgctttccctagtgtatattcttgtcagctttgtcaaagatcagttgcctatgaatgtgtggctttcattttggattctctcgtctgttacatcaatctgtgtgtccacatttatacctgtaccatgctgtattggtgactatggctgtgtaatatattttagagttaggaaatgtgatgctcccagctttgttcatttgcttcagctgaaaaggttgagtccacaattacaaagatggcagccgcccatccccggaggacctccaacccagaaagagatcaggcttcccaccaaccctataaccctggctggagttcctgaaattccaacagggaggaccttcccagtgaggagggatgaatcaaggtcaaatttaaagaaacagtctggccactatcaggcacagcagcagtgctgccttgtgggggacccctcctgctccagaccagctgccctccctggagcccgaaggctagattgtctgagtctacggaaacagagacggtggccgccccaaccacccagaactcggtagtctcaggcacttggcttgctatcttgccactgcttggctggtattccaagcccgtgggacttgagaagtgctgtgatgatggggaccacaggatgaggctgtctggctccctgtgatatggctgtgatgagtggaggaacaccagggctcatgtctcacacagaattggagaaaatgacacaaacacatgtacagtggttttatggcgtgcagtttaataggcaagaacgaaggaagagctccccatactgagacagagggaggggggctccaaagccaaaagaggaaacccggagtgctgtggataccaatgagttatatgaagaaactggagggggcggtgtctgatttgcatagggttcaggcgattggttcgaccaggcatgtcatttatgtggcccacggaaaaactggccctcccacctagcctttgaatatgcacgtgccggacaccctgatttcctacactcatggggatatatgggggtggccatatcgccaggcacaggtggggacaagggccagaagagggcgggaatcgctatgtttgggtggacccagtttctaatggccggcatctgcagatcaaggttaccggagaactctaaaagccggggctttcctgctagacaagactcatttctggagctgctttaaaaagaaacaaaacttcccaaggaccccttttcctccctgtctgcccaaaataatttcttaacaactcgtataacacctgaattcagcccccttactgggggaatgtaccaacggaactcccacctttcctggtttctcaaggctagattgtgtaaacctcctgggtctcggtctgtgtctgagcagctgctctgccaacactccacacagccctgtgtactaggcccaaggccgccgtgactcagcccatgggaggatctcctgatttcttggttgcaaagatccatgggagaaaaatggtttctggggcggggtcacacactcatggcttctcttggctgtgcaagaaggttcctttggctctgttccaatatagcgtggttcatcacccacccctgttttctttgttctcctgagtcaagttgtttgcctagtcagtcccaatgtgagaacctgaatatttcagttcacgtgcttatcgtgaaattcactgagactttaattcagtggaaggcagcctcttctaattggccatcttggcccgccccctccacgtcacctcccataaaatggccacgctctccagggacgatgccattatatatctttacgtgaaaccgacagaacacttattacactttttgtgagctcatttacttcacttataatgaacatggccatggaaatgctagtggagaaagtggtcgattttctgatggatgtgataaaaaaatggtttgccgaccaattaatgacatatgtctcaaaactagtaacgagacccttaatcgctgggttgaagtttctaatcaagaagatgctcatctatgtattcaacaaagcagcttcccttgcttctgaaatgcttccaaacaacatctcatatttcctgaagaagataatgcctggacaagcagcacaagtcattcaggtttactttcagctcataaatccagcaggatattcgcacaattgttgggaaaccttatcagttcatgagtcgtgcatgtttcctttaatttcaggaggaagagggtaatctggaagagtttcctgacctactctgctgctgtgattaaacaaccaccaggaaattttgatgacactgttctcctgagctcctccctttcctcggggaagaaaagcattgaaactacaaaaataaagtgttatttggctggagtgaggtctcatgtctgcttatgcggtggctcgctgctcagaacagggtgagtctctgagttgtacgctgaggaggggaggctgtcaatctagaaaaaacccattgcatgggacacctccatggggtctggggggctgaggatgaggagctggactggatctagggaaggaggaggtttcagagggtgaaattctggcagtaaatcctgggggtgtttgaaaacttcctccctcagaaggagaagactcagggaggaataaggacaaaccatgggtcccttgaggggcatttactaacttaagaggactttatcgggaagcagagtgacaatggcctccttgaggactgaggcccctggataaatgaggcccagatccagatccagtccatgggagatgagaccttcaagggacatatttttgttgggacagaggaaaagtgcagctctgcagctgcagaggaagccttggcagtgtgaaagcgaccttggagggggccctgtgcgttctgaatgcttctgaggtccatcccctgtccccgcctctttttctggattttttgggctccatggtctccgccatcttctgagcgctccacgctgccaccttcagttttctcttctgggctccaaatactccaaaatctttcatatctgtgcccctacccctgtttttagcatgtgttgggactccaggtccctgaaggtttctggcctgaaatccacctccccagcggtgtggattctgctctagagaccccgcacttggcaaggttcccaggcccctgggggacaaccgagtggtatgtgcacttcagggctccacactcggcaaggtctttcaagcccttggggttccctcctcagttttcttcacatgtctgggatgtagtcactctataaatgccgggatgtgatccccaccccagtgattttttttagttccatgagtgttgctatctgaatagtcatcctgagagtgatgggaccttttgaatttgcagcaagttttagattagtgtgagtggcctgagatcgcaaaactggggctagcattggatgtgaggttaggctggtggaaaaatttgcccagaacctgaggagtgtgggctcactgcaggtggttaggatcagcacagaattgcaaggatgtatagctttggggtaaagaataacatggttcagaagtacatgtattagtcttttcatgcattgctataaagaattacctgagactgggtaattaattataaaaactcaggtttaattggctcatggttccacaggctgtacaaaaaggatgatgctggccatcagctcaacttctggggaggcgtcagaaaacttagagtcatggcaaaaagcacaagggaatcaggctcatcctccatggccagagctggagctagtggtaggagaggtgctgcacacttttgaacaatcagatctttttagaactctatcaccagacagcacctagaggatggtgctaaattattcatgaaatatccacccatatgatccactcaattctcaccggcccaaccaggaccacctccaccattggggattacaattacacatgagatgtgggtggggacacagatccaaactcgatcagtgggcatcttggactgggtctactatagaagaagaaccaggagctgactatcatccttaagactgcccatgatggccaggcagggtggctcatgcctgtaatcccagcactttgggaagccaaggtgggtgaatcccctgaggtcaggagtttgagaccagcctcgccaacatggtgaaaccctgcctctactaaaaacacaaaaaattagatgggtgttgtgccagacgcctgtaatcacagctactccagaggctgaggcatgagaattgcttgaacctgggaggcggaggtggcggtgagccccaatcgcactgctacactccagcatgggcaacaataccaaaacatcgtctcaaaaaaaaaaaaaaaaaaaaaaaaggctgcccatgaccactgccccagtgagagggacaccagcatggctaagatcaagtgctggacattcttcatgggtcagacattaaagcaggccacactgttacagagatgggctccattcatagcaacaaagtggtgagaagatgtgggaatggcagaggccagcactttgccatcaatgcaaggtgggcataaggagctggcaccagtgccagagtgcatcaggggaggactgctttgcaatatctagcacttacctcttagagtatgtttcattagggacaacagatataaatggcagacaagtgagtcccttcagtaacaggaaatagaaatcatcaagaggaacagaaacagatgtcagcagccctcatataaagtcatcatccttcatccagttaaaacctgagacagttctcacataagaaggtctaattcaaaaagagactgggttctcatgaggcaggttcatgcaaaaccaagggaagtatacaactttgggattctccagcttcccttggaaaagacctacaatcatttgcttaggtaactgagcactgaacaaaggtgagtattgttatctttcagaagctgttggccatgaaggtcttgctggcataaaacccatggttggaaacatcaccatgacccctgttagagtaatggcctaagggcaagggtcaggaaattgatgtattccttgccaacttctgcgagacgagtgttggtccactcatctctttcacggaattcaccagtctggtatcttcaaaatccagaaggatgatggcagatggcaggaaactaatgcaaacaccatcagttgtacctccactgtagcagcagtaatggatgttatctcttcattgtaatatccagggagggagaagatgacattattctcaatattctaaacaccctgtgtgtacagcctctgtgatattttttgtaatatccgtgtgggagagaattatattactcctaatatctcaggggttgtgccccctctgtgacaatgttcctaacacccaggaggggataggatgatatcacttttagcatcacagggggtgtacaccccactgtaatattgttcataatatccgggggggagagaatgatattactcccaatatcgcaaagactgtacaccaacctgtgatattatttgtaatatccataagaggaagaataatattactcccaatgtcacaggaagtgtacacccttctgtgatattgttcaaaagatccagttagggaggggatgatattactctcaatatcttaaacaccctgtaggtaagccctctgtgatattcctcataatatccagagggagaggatgatattactcccaatattgcatgaagtctacaccccacctgtgatattgttcctaatatccaggatgggagaggatgatattactcccaatgtcgcaggggatgtacaccttccctgtaatattgttcgtaatatctagaaaaggagaggataatattactttcaacatcgcagggggtgtacaccttccttgttatattgttgctaatatccagggaaaaagaagatgacattaccaccactattgcagaaggtgtacacccccccttgatatagttcctaatatccagaaaaggagaggagatattactccaaatattgcaagaggtgtacattcccctgtaatatttttcctaacattcaggaagaaagagagtgatattgcccttaatattgaagggagtgtgccccccccgtgatattgtttctaatatccaagaaatgaaaggatgatattactcccaatatcacaggggctgtacagccccctcccatgatattgttcccaacatcggggggggggtgaaatagtattattcccagtatcacaataggtgtacacacctgtcgtgatattgttcctaatacccatgggggaaaggacgatattattcttaatatctcagagggatgtacaccctccctgtgatattgttcctaatatccggggtgggagaggatgatattacccccaaaatctcaaagggtgtacacccctcttgtgatattgttcctaatatccagggtggagaggataatattattcccaatatccaggaaaggaaacgatgatgttactgtgaatattccagggggtgtcctcccctctgtgatattgttcctaatatccaggttggggagattatgatatttctccaaatatcacaaggggtgtacaccaaccctgtgttattgttcctaatatcgatggggggagaggacgatattactcccaatatcacagggggtgtacaccacctttatgatattgttcctaatatccatgaagaaagaggatgatattactttcaatatcgcaggggatgtacactccccctgtgatattgttagtaatacctaggagaagaaagtgtgatattactcccaatatcgcaggggatgtacacgcttcctgtgatattgttcctaatatttagggggaaaggggatgatattactcccaatatcgaatggtgtgtacacccccccgtgattctttttttttttttttttttttttttgagatggagtcttgctctgccgcccagactggcgtgcaatggcgcaatctcggctcactgcaacatttgcctcccaggttcgcacgattctcctgcctcagccttcggagtagctgggattataggcagctgtcaccataccaggctaatttttgtatttttagtagagttggggtttcaccatgttggtcaggctggtcttgaattcctgacctcaaataatccacccaccttggcctcccaaagtcctgggattacaggcataactttccctgtgatattcttcctaatattcaggaagaaagaggatgatattgctcccaatatcgcagagagtgtgcactcctcctgtgatatggttcttaatattcagaggaggagaggatgatattactttctatattgcagaaggtgtacacctccctcgtgatgtctttcctaatatccagtgggggagaggttattagtctcaaaatcacagaaggtgtaaacccccatttgatattgttcctaatattcaggggtggggagagaaaggtattactcctagtatttcagggcatgaacacccccaccgtgatatcattcctaatatccagaaggggaggcaatgatatttctcctaatatcacaaagggtgtacaccccttctgtgatattgtaaatattctgtgtgtacacccccctgtgttatagtctgtaatatccgggtgggggagagggtgatatttctccccatattgtaggggatgtacacccttctgtgatatggttcgttatatccagggaagaaaaaggtaatattgctgcccatattgtggagagtgtacacccccatgtaatatggttcgtaatatccaggagtggagagggtgatactgctccttacatcgaggaaggtgtacaccttattgttatatgattcgcaatatccaggggaggagagagtgatattgctccccatgtcgcagggggtgtaaaccctccgtgatatgattggtaatatccaggaaaggaaagggtgatatttctccccatatcgcgggggacgtacatcctcctgtgatatggttcgtaatatccaggaggaaagaggaaaatattgctcttcataacccgaggggtgtacaacccctgtgatatggttcgtaatacccagaagtgtacacccctctgtgatatggtttgtaatatccagggggttagagggtgatattgctccccatatcgcagtgggggtacacccccctggattggttcataatattcatggggggagaaatttacatttatcctcatatcagggggggtgtacaccccccgtgatatggttcgtaatatccaggggaagaaagggtgatattgctccttatatcgcggaaggatcaccctcccctgtgatatggttcataatacccagacgggaagagggtgatattgttcttcataaagcgaagggtgtacagccccctgtgatatggttcataatatgcaaaaggggagagggtgatattgctccccatatcacggagggtgtactcccttctttgatatggttcgtaatatccaggggtgtagatggtgatatagctcgccctattggggagggtgttcacccctctgtgatattgttcgtaatgtccagggaaagagaggatgatattactcccaatatcgcagaaggtttacaccactctgtgatattgttcataatatccagggaaggagaagacgatattactcccaatatggcagggggtgtagaactcctgtgatattgtttgtaatatccaggcaaggagaggatattactctcaatatcgcagaaggtttacacccctatgtgatactgttcatgatatccagggaaaaagaggatattactccctatatcacaaagggtgtacacccctttgtgatattttttgtaatatccaggggagagaggataatattactctcaatatcagaaggggtgaaaaccctcctgtgtcattgttcataatatttagggaaggagagagtgatattactccaaatatcacagtgggtgtacacccccctatgatattgttcctaatttccagaaggggagatatgatattattgccaatatcgcagaaggtgtacaccttactctgacattgtttgtaatatccagatggggaaatgatgatattactcctaatatcacagggggtgtacacccccttgttttattgtttgtaatattcaggggaagagacgattatattactcccaatatcgcagggtgtgtacaacactctatgatattgttcataatatccaggggaggagaggaagtgtacacccccccgtgatattgttcgtaatatccagaggtagagaggatgatattactcccaatattgcaggtggtgtacacctttctgtgatattgtcatgatattaagaaggggagaggatgatattactaacaatatcacaaaaactgtacactccctgtgatattgttcataatatccagaagaagggaggatgatattattctgaatctcgcagaagatatacaccaccctgtgatatggttcataatatcctaggggaaagaggatgacataactgtcaatatcgcagggggtgtacaattccctgtgatattgttcacaatattcagagggaaaaaggataatattactttcaatatcgcaggcggtgtacacattactgtgttattgtttataatatccggaatgagagaaaattttctcccaatatcacaggaggtgtacactcccctgtgatattgttcgtaatatccagggaggggagaggatactattactcccaacatctcagggagtgtaggccccccctttgatattgttcctaatattcggaagtggagaagatgatattacttccaaaatcgcagggggtgtacactccctctgtaatattgtttctaatattcatgagtggaaagaaagatattactcccagtattgcaggggacatacaccacactgtgatcttgttcacaatattcgggggggagaggatgatattactcccaatatcaaagtaggtgtacacccccttctgatattgatcgtaatatccagaattaaagatgataacgttactcccaatattgcagggggtgtacatttttgaatactgttcataatattaagagggggaggggatgatatctgtcccaatatcgcaaagtgtgtacacctcctgtgacattgtcccaaatatccagaggaaaaaaggatgttattactcttaatatctcagagagtgtacacctccctgtgatattgtttgtaacatccagaagaaagaggctgatattactcttaatatcgcagggggtgtacacccccgccccgggatattattcgtaatatccagggggaagtggaatgttcagaatgggagaggatgatattacttgcaatatcatagtgggtgtacaccccactgtgatattgtttgtaatatccgggaaaggagaaaatgacattcctccccatatggcaggggctgtacaccacctatcatattgttcaaaatatccagaaggggagaggatatgtctccaagtatcacagggggtgtacaccccgctgtaatattcttcctaatatccagggtgtgagaggataatagtactcccaatatcccagggcatgtacaccccccttgtgatgttgttcctaaaattcatggggagaaagaatattactcccaatatcacagggggtgtacatacactctgtaatattgttgccaatatgcagcaggagagaggatgatattactcccaatatcacaggggctgtacaccccgctgggatattgtttctaatatcaagggggaaaaaggatgatattactcccaatgtcgcagggtgtgtacttcctctttgtgacattgttcctaatatccaggagagaagagggtgacattccttccaaaactgaaaggggtgtacacaccctttgagatattgtctttaatatccagaacgaaacaggatgatataactcctaatactgcaggggggtacaccctctctgtgatactgtttctaatatccaggaggggaaagaaaaatattaatcccaatatcacagggggtgtacattccccctttaatattgttcctaatatccaggaagacacaggatgatactatttccagcagcacagggcatgtacacccctttgtgatattgttcctaatatccaggaaaagagaggatgatattactgtcaatattgcagggcgtatacactggttctgtgatattgtttctaatatccgggggtggagaaaatgatattactcccaatattccagcgggtgtacacccgttctatgatattgttcctaatatctgggggagagagaatgatattattgtcaatatcacaggggatgtacagattccctgtgatattgtttctaatattcacagggggagaagggtataatactcccgatatcgcagggggtgtacactccccctgtgaagttgttcctaatatccagggattgagagaatgatattactcccaatatcacaggcggtgtaaaccccctgtgtgatattgttcctaacatccagaggaaaagatgatgatattattttcaatatcacagggggtgtacgcatccctgtgatattgtttctaatatccaggggaggagaggatgatattattgttaatatcgcagggggtgtaccccaccctgtgatactgttcctaatatccggggtggaagaggataatattgctcccaatatcgcaaagggtgtacaaccttcctgagatattggtcctaatatccagggagggagaggatgatattactttcaatatcacagggagtttacacaacccctgcgatattgttcctaatatccagcggaagaagagttaggataatactattttcaaaattgctgggtctgtaccccctccccgtgatattgtttctaatatccaggaggggagaaagtaatatgactcccaatatcttagaagatgtacaccctccccataatattatttcttacatccagggggtagaggatgattttgctttcaatatcacagagggagtaaacctttccggtgatattgtttttaatatttaaaaagagagaagataaaattactcccaatacaaaggggatgtattgtgtactcccccctctgatattcttttttaatatccagatggagagaggatgatattactttcaatattgcatgggatgtataaatcccctgtgttattgttctgaatatacaggtggggagagtatgatattactccaaatatcgcagggggttctttccccctgtgatattgttcctaacattcagggagggagaggatgatattactcttaatattgcagggggtgtacccacgcctatgatattgttcctaatatccagagggggagaggatgatctaactcagaatatgacaaggggtgtacacacagcctgtgatatggttcctaatatacaggggagaaggggataatatttctcccaatatcgcagggggtgtacaaccccctgtgatactgttcctaatatacagaaggggacagcatgatattgttcctaatatcgcaggaggtgtacaacgccctgtgatattgttcctaatatccagggcgggagaggatgatattaccctcaatatcgcagggggtgtgcactttccctgttatattgttcctatgatccgggtggggggaaatgacattagtcccaatatcgcaggatgtgtgcaccgctcccccgtgatattgttcctaatatcaagggggagagaggaggatattactcccaatatcgcaagggatgtacatcctccatgcgatattgttcgtaatattcaggaggagagaggatgatattactcttaatatcgcagaaagtggacacccaccctgtgatgttcttcataatatccagggaagcagacgattatatgactttcaatatcgctgggagtgtacatcccttttgggatattgtttctaatatccaggaagggagaggattatattactctcagtattgcaggcagtgtacaccttttttgtgatattgttcctaatattcagaaagggaaaggatgatattactcccaatattgcaggtggtgtatatccccctctgatattgttccttatatcaaggaagagaaagaataatattactcccaatatcaaagacagtgtagacccctcctgtgatattgtatttaatatccatggggaaagaggatgatgttactcccaatatcgcagggggtttacacccacactgtgatattattcctaaaatccagtggaggagaaaataatattgctcccaatattgcagggtgtatacaggccctcccccgttatattgctcctaatatccagcggtggagaggatattactttcaatttgtgtagggagtgtatacccccctgtgatatttttctaatatcaaggatgggaaaggatgacattactcccaatatcgcaggaggtgtacacgccctgtgatattgttcctaatatctagggaaggagaggatgatattactttcaatattgcaggagctgtacaccctctgtggtattgttcttaatatttaggttgggagaaaatgatatgagtccaaatatcgcagaaggcatacacacttccaataacattgttcttaatatccgggggagagggtgatattactcccaaaatctctggggggtgtacacccccttctgatatttttcctaatatccagggaaggaaacgatgatattactataaatattccaaggagtgtacaccttcctaatatcctaatattgttcctaatatccaggggtgggagaggattatattactcccgatatcgcagtgggtgtacacccctcctgtgatattgtttctaatatccaagctaggagaaaatgatatcactctcaataccacagggggtgtacaccttccgcatcatattgttcctaatattcagagggaaagaagatgaagttactttcaatatcggaggggttgtacacaacccctgtgatattgctgctagtatccaggaagaaaggggattatgttactccccttatagcagggggtatacacctcccctgtaatattgttcctaatatcaaggctgggatatacgtggggggaaggatgatattactcccaatatcgcaggggttatacaaccttctgtgatattgctcctagtaaccagggcagaagaagatgatattactcctaatatcgcaggaggtgtacactcccccattatgttgttcccaatatgcagaaaaggagaggatgacattattgccagtatcgcagggtgtgtacaccacccctgtaatattgttccaaatatttagggggagagaggatgatattactcccaacatcgcagggggtgtacacacatcccctgtaatatagttcttaaaatctaggggaaaaggggatcttatttctctaaatattgcagagggtgtacactccccggtgatattgttcctaatagccgggagggagataattaaattactttcaatatctcagagagtgtacatcgcccttgcgatattgttcctaatatccagagcaaaagagaatgatattactcccaatatcttaggagtgtacatttaacctgtaatattgttcctaatatccagggggaagagaatagtattactgccaatatcgtaggggttgtacaccttttctgtgatattgttgcaaatatttagtagagggaaagaatattactcgcaatatcacagggaatgtatacttcccctgtgatattgttctgatatccagaaaaagagagggtaatattactcccaatattgcagggggtgtacaccccccttgtgatattgatcctaatataaaggaaggaagaggatattactcctcatatagaaggggttgtccaccccccttgtgatattattcctaatattcagggaagcagaggatgatattattttcaatatcacagagggtgtgcagtccacctgtgatattgttcttaatattcggggggagaggatgttattatgcctgatatcgcagtagaggtacacccctcaagtgatactgttcctaataaccaggggtgaagaggatgatattactcccaatatcgcaggtggtgtacacccccccatgatggtttctaatatacagagggggagaggaaaatattactcccaaaatcgctggaggtctacaccccccttgtgatattgttcctaatatccaggaaaggaaacgatgatattactgtgaatattccagggggtgtacacccgctttgtaatattgttcctcatatccagggtgtggagaggattatattactcccagtatcgcagggggtgcacgacgcccctgtgatattgtttttcatatccaggaggggagattattatcaatatggcaaggggtgaacaccccctgtgatattgtacttaatagttaggttggcagaaaatgatattagtctcgatatcgcagggggtgtgcactccgcctggtgatattgcttttaatatcaagggggagaaaatggcattactcccaatatcgcagggggtgtacaccgctcatgtgatattgttcctaatatccaggtggagagaacataatattactcccaatatcgcacaaggtgtacacccctcctgtgatatggttcctaatatccatgggaggagatgatgatattactcccaatatcacaggggatgtacaccacccttgtgatattgttcctaatatccagggaagaaaacgatgatattattgtgaatattacagggagtgtacacactccctgtgatattgtttttgatatacagggtgggagaggatgatattactcccaatatcacataaggtgtacaccccccgtgatattgttctaaatatttcggtggggagaaaatgatattagtctccatatcacagggggtgtgtgctcctcaggtgatattgtttttaatatcaagagggggaggagattatattactttcattatcacagggggtgtacacccctcctgtgatattgttccttatatccaggcgaggggaaaataatattactctcaatatcgcaggaggtgtacacaccccatgtgatattgttcctaatattaagggggaaagaagataatattactttcaatatcacagggtttgtactcctttcttgtgatatagtttttagtatccagggggaaagagcatgatattactcccattgtagcaaggggtgtacacacctcctgtgatattgttcctaatatccagaagtggtgaggatgatattactcccaatatcgcagggggtatacaccccacctatgatattatttctaatatccatgggaaaagagtatgatattacacccaatgtcgcagagggtgtgtatttttcctgtgatattgtttctaatattcaggcggggagaagatgatattactctcaatatagcagaaattgtacatccccgctgtgatattcttcataataatcagggaaaaagaggatgatattactaccaatattgcaggggggttacacttcccctatggtagtgttcctaatatccaggaagaaagaggatgatattaatcccattatccaggaagtgtacacccaccctgtcatgttgttcctaatatccagcagggaagaggatgatattacaccccccccccgtgatattctccttaatatccaggaggggagaggctgatattactggatatatagcaggggtgttcataccttctgtgatattgttcctaatatccagaaaaggagaggatgatattacttccaatatcgcagaaggtgtacacctccctgtgatattgatcctgacattcagaaggggagaggatgatattactcaaaataccgcagggcatgtgcattcccttgtgatattgttcctaatacccagaagggaacaggataatattactttcaatatcgcagggagtgcacacccccctttggtatggttcttaatatccagaaggaaagagggtgctattactttccatattgcaaggggtgtacaccccactgtggtatggttcataatatccaggcagggagagggtgctattactccccacagtgcggggcatgtacaccctgctgcggtacggttcctaatatccagggggagagaggatgctatgactccctatatcgcggggtgtgtacacccctgtgtggtatgttttgtattctccaggaacggagagggtgttgttacccctcatatcgctggaaatgtacactcccctgtggtatggttcgtaatatccaggggattgagggtactgttacccccatactccccatatcgtggggggagtgcacctccctgtggtatggttcgaaatatccagggtaagagagggtgctattattccccattttgcaggaggcgtacacccccctatggtatggttcgtaatatccggggtgaggggatgctatcaaaagaagagagaaagagaccccccatattgttctatattattttatactcagtacctgttttaagaagaaacaaggaagtgaaaccaaaagcaggcagcccggcgccaggcaccagacccaaaaccagacccgaaaccaggcctgggcctgcctgaccttagcctgatagttaaaattcaacccatgacctagcaaccaatgttatccatagattccagacattgtatggaaggacattgtgaaatttcttgttctgtgctgtttcactctgattaccggtgcctgcagcccctgtcacatacccactagattgctcaatcaatcatggccctttcatgtaagatctttagtgttgtgagcccttaaaaaggacagaaattgtgcactcaacaagctcggattttgagacgctagtctttcgatgcttccagctgattaaaagccacttccttcactacctcggtgtctgtggggttttgtccgcgactcctcctgctacactatgactccccatatcaaggggggtgtacacccccctgtggttcgtaatatccagcaggggaaaaggtgctattactccccatattgcagggagtgtacacccccttgtagtatggatcgtaaaatcaaggggggagggaaggtgtaattatccccatatctcagggggtgtacacccctttgtggtaaagtttgtaatatccagggatattacagggatattatccccaaattaatacttttataatttcttatgcctgcctttactgcaatctctgaacataaattgtgaagatttcatggacatttatcacttccccaatcaatacttttataatttcctatgcctgtctttactttaatctcttaatctcatcatctttgtgagctgaggatgtatgtcgcctcaggaccctgtgatgattgcattaactccacaaattgtttataaaacatgtgtatttgaacaatatgaaatctgggcaccctgaaaaagaacaggataagagcgatgttcagcgaacaagggagataagcataaggtctgactgcctgtggggctgggcagaacagagtcacatttttcttattgcagaaaatgagtaggagaaatatcactgggaagggaacgcattcctaggggaggcctatggacggccgctctgggggtgtatcccttatgtggttgaagataagggatgaaatacaccctggtcccctgcagtgccctcaggcttgctaggattagaaattccagcctggcgaattctagtcagaccagttctctgctcttgaaccccgtttcctgttaagatgtttatcaatgacaatgcgtgcacagcaggacatggaacctcaatagtaattccattttctccctggccttgtgaccttgctaggcccttctgcccttgtgatcttttattgccatttgaagcatgtgatctctgtgacccactccctattcgtatccccctccccttttgaagtccctaataaaaacttgctggttttgcagatcaggtggtcatcacagaacctgccgatatgtgatgtcaccccggaggctcagctgtaaaatttctctttcgtactctttcactttatttctcagaccaggtgacacttaaggaaaatagaaaagaacctactttgaaatattgggggctagttcccccaatagacattgttcctaatatccagaaaaaaagaagatgatattactcccaatatcacaggggttgtgaaccccacctgtgatatggttcctaatatccaggaagggagagaatgatattactctccatattgcagggggtgtgcacatccctgtgatattgttcctaatatccaggggaggagagggtgatattactcccaatattgcaagggttgtaaactccaccctgtaatattgctcctaatatttaggatttagggggggagaggataatattactcccaatatcgcaggggatgtatatgccctctttgatattgttcctaatatccagggggggagaggataatattactttccatatcacaaagagtgttcacccccctgtgatattgttcctaatatccaaaaaggaagaggatgatatcaatcccaatatcacaggaagtgtacaccccccccttttatattgtttctaatatccaggggaaatgagggtgatatttctctcaatatagcagaatgggtacactccccctgggatattattcctaatatccaggggaaaaaaagaggttgatattcttcccagtatagcagggaatgaatacaccctttgtgatattgcttctaatatcaaggggaaaagaggatgatatgactcccaatatcacaggggatgtaaacctgtggcgttgttgctaatatcaaggagggaagagtatgatattactcctaatgtcgccgaaggtgcacactttccctgtgatattgttcctaatatccaaaagggaagagaatgatattacccccagtattgcagggtgtacaccacccctgtgatattgctcctaatacccaggaaaaaagagaatgctattacccccaatatctaaggggacgtataccttccctgtgatattgtttctaatatccaagtggggagaggatggttttactctcaatattgcagggagtgtacactccccctgtgatactgtttctaatactcgggctgggagaaatagtattactcccaatatcgcagtgatattgtttccctgtgatattgtttctaatatctagtgggggagataattatattactaccccatacacaggggagggtgtacattcccctgtgatattgtttgtaatatccagggaaggagaggatgttactcccaatatcacaggggttgtacaccccttttttgatattgttcctaatatctggggggcagagaattatattactgtcaatatcacagagtgtgtacaccccctctgttatattactctttatattcagggcggtagaggatgatattactccctatatcacagggggtgttcacccctcctgtgatattgtttataatatctaaggggaaagaggatgatatcactctcaatatcaaaggaaatgtacacctttcctgtgatattgtttttattatataggggggcagaggatgatattaagaacaataccacaggggatgtacacccacgtattgatattgtccctaatatgtatggggaaagaggacagtgtaactcccgatatcgcagagtgtgtacacccccttgtgatattgtttctgatatacacggggagaaaagataatatttcttccaaaattgcagggggtgtacaaccccctgtgatattgtttttaatatccagtgggggagagaatattactcccaatattgcagggcgtgtacacaacccctgtgatattgttcctaatatccagagtaggggaggatgacattactttcaatatcgcaaggggtgtacattcccctgtgatattgctcctaatatccatgaggggagaggatgatattattcctaatatggcaggggctgtacaccttccctgtgatattgtttctaacatccagtgggggagaaaatgatattactccctatatcacagaaggtgtacactttccctgtgatattgttcctaatatccagaaggggagaggataatattactcccaatatcgcaggaagcttacaactcccctgtgatattgtttctaatatccagggaggtagggatgatattactcccaatatcgcaggggatgtacactcccccgtgacattgtttctaataaccagggggtgagaggatgatattacgcttaataccgaagggggtgtacacacccttgtgatattgtgcctaatagccagggggaagaaaattatattaattttaatatttatggggaaaaaggatgatattactcccaatatcacaggggctgtacaccgaccttttgatattgtttttaatatccagaagagaagaggataatattgctcccaatatcagaaaaggtgtaaaccccttctgtgatattggtcctaatatccagggagggagagaataatattactaccaatatcacagaaggtgcccacccccaaggtgatattgctcctaatatccaaagataatagggtgatgttactcccaatatcacaggaggtgttcacaccccttgtgatattgtttctaacgtacagggaagggagaggatgatattattcccaatatcacaggaggtgtatactcctctgtgatattgattttaatattcggggggaaaggatgatattactccctatatcgcagagggtgtacaccctctgtaatattgatcctaatatccagggcgggataggatgatattactcccaatatcgcagaaagtctacacaacccccagtaatattgtttttactatccagggggaagaggatgacattactcccaatttcacagagtgtgtacactcaccatttgatattgtttctaatatctagggggagagaatatattactcccaatatcacaggaattgtacaccacctctgtgacattcttgtgaatatccggggaaaaagagaataatattactcccaatattgcagagcgtgtacacccctccatgatatcgatactaatatttttttaaagaggatgatattactcccattgtcacaggatgtgtacaccccccttgtgaaattgttcataatattctggggggagagcataatattactccccatatcgaaaaaggtgtccaccctccttataatatggttcctaatatccaggatattacttaatccaggatacttgtaataccctaaatatacaattgcttgaacctccacctcccaggttcaagcaattcttctgcctcagcctcccgagtagctgggactacaggggcacaccaccacacccagctaatttttttttcttgtatttttagtagagatggggttttgccatattggccaggctggtctcaaactcctgaccttgtgatctgcccacctcagcctcccaaagtgctgggattataggcgtgacccaccgtgccaagccaggaagaggatgctctatagatttccccaataagagatggctttgcagggccattccaaaatatgtcaaagaaatacatttggggataaaatactttgatttcctttagggaatgttatctattatgtgatgctataccagagtcaggttggagtcggttatcttattgcaacaaagagtctgttccgtcactgttgggatctctattttttcctcttatttcttgagacagggtctcactctgtcacccagtctggagtgcagtggtgcgatcttcattcactgaaacctctgcctcctgtgttcaggtgattctcgtgcctcagccccttaagtaactaggattacaggtgtgcgccaccacacccagctaatttttgtattttcagtagagatggtattttgccctgttggccaggctggtcttgaactcctggcctcgtgtcatctgcccacctcgacctcccaaagtgctgggactgcaaatgtgagctattgtgcccagccaggatctctgttttaatgttagtgctggtcactttgcatgaactccaaagggaagaaatataatgaggtgtgtctgaccccctgccttctcatcgtgacctgaattagtttttcaggtttgcaggggatacccttggacaagaaggggctctattcggttggttggggggattagaattttactttttgtttacaatatttctcctgaaagagttaggggctcacaaggaatttccgcgtgagcaacttatgaggaaagccatctgggaagatatgtgtccttgtgtcactgggatattctcgtttaccccaatgatacggcaatgacgcagggttgtgaaattacagctatgtgtttggggaaaaaagaaagcaggattgtgtgactacgtttccaaacttcacttgcccttagccatagtgagttgggggcctggagattctgttttctttcacaatgatatagatacaattaaatgtatagaaagcaaaaaaataaaaaggtgagtaatgaggaacctctgattcctgagtggccatgtagttacccatggcacagagccacagttactgaaggtaaagtttgctggggaatttagaaatgaatccagctcttggaggagtcagtttactggatgcctaagaaaatgcaaacaaaataagaaaaaagggtaatattcaatcccatagttattgttacctgtcatagctaaagtaaaattaaaacagagtgctggcttcaatcttgatgctacactaagcttagatttcagtgaatgtgagtctcagccactagctcagagccacctcccaaagaccaaatcatgtagggacaatagaaagtacttctgagaattgtggttaccaagaacctagtaactgttggggaggagcaaaacaaagtacagaaaccagagggtacaatctgagtgagactgctatcagcttctggaggagcctttactaaaatgaatgatgagagtaactggatgatgagagtaactaatggatgatgagagtaagcaatgtctttggttttcttttttttttttttttttttttagcagacgtctcactcttgtcgcccaggctggagtgtaatggcatgatctcgcctcactgcaacctccacctcctgggttcaagcaattctcctgtctcagcctcccgagtagctgggactacaggcactcatcaccacacctggctaatttttgtatttttagtattttctggtgagggtccaggtttccggaaacaactcagagacatatgttaagatgttatctttagttttcacagggaaccaaatatgttacgactccaatttccttggctattgttttaagttaccattaccttctcgttgatcaagttgctcatttacttctcaagcctagctagatgcctggaatttcccttgaaggaagtcaagattttcctttatctccatactggctgatggtgatcgagtaagcccctaagaggggtccctgctccatctcgagatgctgctagattctacagtgcctaataaacagctctcgcctggccgacaaagagctgcttgctctctggatagcaattccaaagtgaacagacaacatcctgtttggaagactgccactctgttagaagaagcatcaggaaaacctttcttttgagctatttataactaacagcaattgaccaagtatacttttgtgagtgaaactgacctttctccctgtaagaattctccaaaatttggaaactatttgtgagtatttttacttatggcaatataattattggcacaagctcaatcagattcggttttctttcgtaacaggaaccattggagatactcattactctttgaaggcttacagtggaatgaattcaaatacgacttatttgaggaattgaagttgactttatggagctgataagaatcttcttggagaaaaaaagactgggtatattttcaatatgctttccttttaaggtccctcacctgtggaaagtaaagaatgtcactttctgacaggctcaggaacctcaagttatgtagggatctcaagaagatgggggaattcacccagttcatacaggtgaaattgctgttgcaaagattatgaatatgagagaagtccagcatggctgacttcatctcgtgtctggcctcaggctggctgcccttgctcactcttgggcataggccaagctagccatgggaggaatttagtttatagtttaactttgaagcacggatgataatagtctctccctaaaatgaaccccttccttgctcagggactgaaactacctttgtatgacaaatgaaagcccacaagattaagattatgagaggggcctgaattctgctaaaatgcaggtgtagctgactgataacaagtcattgtcccacagcttgcctttctataatctcttgcttctcaggagtcacatggccagaggtcctgagatttccagtcctgtgacccccacccagagatggacttagtgcatgaggaccattttccacacccctatgatttcatcctcaaacaatcagcagcaaccattccctagccccctgccttccaaattatccataaaaatcctagcctctgagttattagggagattgattaataatcccagtcctaccccttgggttgctctgatttaattaaaccttctctactgcaataccacggactcagtaaattggttttgtctgtgcaatgggcaagaagaacatgttgcatggttatacaggtactacaagcacagtctgatggcaaattattggttttgcttcctgcccttgatgtttctaaacatctagtccaaaattacttgtgaaaggtccagcaaagccaattttaaaagaggctatatggccaatcactattctttctacacattattgcaaataatcaggccacggctgggcacggtggctcatgcctgcaatcccagcactttgggaggctgaggcaggatcacctgaaatcaggagttcaagaccagcctaggcaacatgataaaaccctgtctctactaaaaatacaaaattagccaggcatggtggcatgcacctgtaatcccagctacttgggagactgagggaggagaatcacttgaacctgggaggcagagattgcagtgagctgagatcacaccactgcactccagcctgggcaatagagtgagactttgtctcaaataataataataataatcagaccaagtataatgaaattaaaatttattttgcaaataaattggtcctactacaatttatccttcatagaaatgtggaaactgaagataaaaaaaattaggtttcagaagaaaactatactacacctgttattagattctagccctaaacattgtttttgaggtttttattatttacctgcaatttggtctaaattctgaattatttcctgactacaagtatccaaggaataaatgggttttctttttctttatgatagttttagttggcttctaatgcaacaacaatttttattgtaatcctgtgtgcattctattcctactattcaaattattaatgttatagatctttcattgtagtacttctgaattaaccaaaatcacagtattctgaagatgattctacaaagcctgctgtttctacaaaggctgctgatgatttctacaaagcctgctgtagtgttgctgtggcctctgcttaaaaaagtagaaaacacattgatgcagcatgttcaccccaacctccctgcctaaaggctcagggaccatcttggaagaggaaggcgcgtgagattgtaagagccgaattagggggatggagtgtggagaataaggacacttcatcttggatgctcacctgccaaattgacttctgatgaaagccagctccagaaatgtgcctacagttactactttcacctaaaccctgcccttagtcaaatccttctcttcttctaagcaatcaacttcaattccttgtataacccacagtataaaagggcttttataccattctatcctattgcatgtaagccttgggtctgggaggtaacagtgtgggattccaccatctcatctccctgccacccaaacatgcctgctcttctttaagcaatattaaatgtttgtacttcagaaatttgatttgtcagcctcttcttcagactctcagcttctttggcctttgggagtaaatttgcataggcctgctcaaaacaggatgttctgggggtttgggggtgttgttttgttttgttttttgttttgtttagagacagggtctcactctgtcacccaggttggagtgcagtggtgcaatcatggcacactgcagcctcaaactcctaggctcaagcaatccccccaccttggcctcccaaagttctgggattacaagcataagccaccatgcccagccctggacttttctttaaagacatttacacagtgtaggaattactgtgggtgcactgctcaggtccccttctccaggatgctcattcctacctcatagatgattttcctgcagagatttgacctcagctgaagggcagtcacctggtccaggtggttgctattcacctccttcctgagaacagccaacagccagggacacgctagcacagagatataagagcgaccaaggtgaggccccttctgtgctgcggtgcatgctccagagcctccctgggatcagacttaagagggtctccagccagatctggtcttcgctgctttcctcgagctccccagcgcactcctgcaatgcatcttttttttttttttttttttttttgagacggagtttcactcttgttgcccaggctggaatgcaatggcgcaatctcagctcaccacaacctctgcctcgcgggttcaagtgattctccttcctcagcctcccaagtacctgggattacaggcatgcaccaccacgcccagctaattttgtatttttagtagaaacgggtttctccatgttggtcaggctggtttcgaactcctgacctcagttgatcctcctgcctcagccttccaaagtgctgggattacaggtgtgagccactgtgcctggcccaatgcacctcttgaatcacctcctcatgctttgcttttagagaacatgatccccaacatgtgattccagcaaagattctagaaagccaaccgtgacaatcacttctgggtttagatgacccccccccaccacaagatggcagtgagcacctcatcacagaggtgctgatggtctgcagcaccgcgccaggccagaacgtgccttttacagaagaaaataacccagtagctgactaggatggtgaggagggctggtgagcactgcggtagtgagagggacactagcatcactgagatgcaagtgatggtcatttttcataggtcaaagctcaaagcaggggacagttacagggcagggcttcatagcaccagtgtgatgaaagtatctgggagtggctaaggccagcactatgccatgggaagcaaggtgggcctgaggaggaggcagcagcgtcagcctgcaacaagtgggggctgccctgcagagacctaagagtcatgttatagagcacagtgtctgtaaggccaagaagtgtggacagccaagtgtgtcaattactagacatactcaagaggagcaggaagggcagggcatggtggctcatgcctgtaatcccagctacttgggagactgaggaaggagaatcgcttgaacccgggaggtgaaaattgcaatgagccgagatttcgccactgcactccagcctgtgtgatgggagcgggactccatctcaaaacaaaaaaagaaaaaggaaaaagaaaaaaagaaaaacctaggtatacttctcaagcaaataaaaataatcaaaaccaatatcatgcccgggcacaaatttcatatatataacagatttaaatatatgagggtgattatcctctcatatctccatttttttttgtttttccatttttttctttactaaaaaaagttaatgccaatgacacacaatttttttttttttttttttttttgagatggagtctcacttcttcgccctggctggagtgcaatggcgtgatctcgactcactgcaaagtctgcctcctgggttcaagcaattctcctgcctcagcctcccaagtagctgggaccacaggagtgagccaccacacccagctaatttttgtatttttaatagagacggggtttcaccatattggccaggctggtctcaaactcctgatctcaaataatctgcccgcctcggcctcccaagattctgggattataggcgttgagccactgcgccccgcctatgtatgattttttttttaattttattttcataagtttttggggaacaggtggtattttgttacatgagtaatttctttagttgtgatttgtgagattttggttcacccatcaactgagaagtatacactgaacccaatttgtggtcttttatccctcacccccttcccaccctttcccccggagtccctgaagtccattgtatcattcttatgcctttgcatcttcatagcttagctcttgaacccttactttctgtttgagggagaagacatatcatctacaagtagatactgtgtaaacattccattgcatgactatcccataacttatttattatttgtgtttggttatttgctgctatgtaacaaccccactcccaactaaatggtgtgacaattccatgattctgtggatcaaaaattctgaaaagtcaaacccaaggagttttgtctctgctccatgatgctaaagcctccgcaggggtgaggcgaatggctcagggtgactgaaaagctcagggttggaacagctggggatgaggcctctatgtataagatgattcttcactcacaggtctgaaactatggtggggacagccagaaggctcggctcagctgggacagtcacctgagccctacacatgacctctccaacatggtgatcctgaagcagttgggtttcttacacagcatcacacttttcttttttttttttttttttgagatgaaatattgctctatcacccaggctggagtgcagtggcacgatctcagctcactgcagcctccgcctaccaggttcaagcgattctcctgctccagcctcccaagttgctgggattgcaggcgcctgccaccaagcccagctaatttttgtatttttagtagagacggggtttcaccttgttggccaggctagtcttgacctcttgacctcaggcgatccgcctgcctcggcctcccaaagtgctgggattacaggcatgagccaccgcgcccggccaaagctcacacttcttatgattcagccttagatgtcacatcagttcattttccccacacttattagtgttagaagtcacaagcccacccatactcaggggactggcacacagaccccactctcaatggaaggggtgggacaccaccattcctgctgatgggcatttgggtaacttcctgtttgaagctattaagattgggctgctgtggccgggcgcagtggctcacgcctctaatcccagcactttgggaggccgaggcgggcggatcacgaagtcaggagatcgagaccatcctggctaacacggtgaaaccccgtctttactaaaaataccaaaaaaaaaaaaaattagctgggcatggtagcgggcgcctgtagtcccagctactcgggaggctgaggcaggagaacggcgtgaacccgggaggcggagcttgcagtgagccgagattgtgccactgcactccagcctaggcgacagagcaagactccgtctccaaaaaaaaaaaaaaagattgggctgctgtgactattctagtaggtgtctttggtgagcgcctacacgtgtttctctttttctctttagtatatgcccaggaggggaactgctggctcccagataccgtatgttcagggtcacacacacttccacagggttttccaaagcccttgtaccagcacgcactcccagcacctgtgtgactgctccagctgtcccacagtctcatcagttctattgctgatattttcattttagcttaagttatatttaataggaaaattaccgttgcctctgccccccgttcctgcctgtaggagtttctcgtagctgttgctacaggtggccacaaatctgtcacttaaacccacacaaattgatgtccttatggctttggagtcagaagtgtcaactgaaggtactagcagggctgtactgacctggtggcctcagggagcatctgtgctgcttctccaccttctagaggctgctgcatccctcgctccagccccttcctgacaccactcaccctcctacttctgttatcacatcctcaccttctctgtgttcagggctccctctgtctctctcttgcaagcacacttgggattccattgagggccacccacataacccaggagaatttctccacctcaatatccttaacaactgcagagcccttttgccataaaagttaccattcacgggttccagggattgtgacatgggtagctttaggagtgattattcctgcctgtctcccgctcaccagaacttggactttctctctcaacaggagccccctgtgtgggaatagcctgtctcaacgacgccctctataaggacctgcttcctcaaaggacctcatagtcgggtcctgcccctcagtgtccagtctgccttggctggaggggctgcaggggtgtgttggcgccacctggtggagacagggcatcacagcaggtgggagcccagtagaagcacaaccaaaacatgggtaatgtttaaaattttctggctaagcgctgtggctcacgcctgtaattccagcactttgggaggccgaggtgggtggatcacatgaggacgggagtttgagaccagcctggccaacatggtgaaacatcccctctactaaaaaatacagaaaaattagctggacatgtggcgcgctcctgtaatcccagctactcgagaggctgagacacgagaatcgcttcaaccccggaggggttgccgagatcgcgccactgcactccaggctgggcgatagagcgagactctgtctcaaaaaaaaaaaaagaagaggggaggcgaggggaggggaggggaaaagggggaatttgtttggagctgagacatccatcttctcctgacctcagatatttgcactcctggttatgaagccttcacacttggactgaatacaccaccagctttcccgatttccagcgtgcaaatggcagatcgtgagacttctcagcttccataattacatgagccaatttatatatataaattgggtcctccagaaaaacagaataaattatatatataattatacgcataacttaattaaattatacgtataacttagctatatatataatttattctgtttttctgaagaaccctactgacacaaatgttgagcatcttttcatgtgcttattggcttaataacttgtacatcttctttggggaaatgtctattcaagttctttgcccattttgtaactgaactattaatatttgtctttacattgttgagttgtaaaagttccttatatattctagatactagagccttatcagatatatttctgcaactattttctcctaatatataggttgtgtttttattttctttttctttttttttttattgagacagtctcactctgtcacccaggctggagtgcagtggcatgatcttggctcactgcagactcgacctgccaggctcaagcaattctcccacttcagcctcctgagtagctgaggttataggcacttgccatcgcacccagctaatttttgtattttttagtagagccgaggtttcgccatgttgcctaggttggtcttgaactccctgcctcaaagcgatctgtcagcctcagtctccctaagtgctggaagtacaggtgtgagccacagtgcccggccatctattttcaatagtgttttttgatgtacacaggtttggaattttgataatgttcaattcatccatttttttttttttttttttggttctttctactggaccaccactcttgagccctctaatccaacctccacgcggcagccagagggagctctctaaatgtaattactctttccctgctccacctgctcaaaacagtgtcacatttgtgatttaaaacagtatttctcaaacctaatttgcaaacaaagcaggtggaactcttcttgtatgcacagcatctgatttggttggtctggcatgggtctgggagtgagcacacctaccaagcggctgctggggtaacttgcgttttccactgatgatttcagcaatgtttccggtcccacatgctcctccagaaccttgtactcccccatgaaaaggtggagtccatttccccttcctttatttatttttttgagacgaagtttcactcttgttgcccaggctggagcgcaatggcgtgatctcagctcaccgcaacctccgcctcctgggttcaagcaatgcttctacctcagcctcccgagtagctgggattacaggtatgtgccaccacgcccagctaattttgtatttttagtagagacggggtttctccatgtcggccaggctggtctcaaactcccgacctcaggtgatccgcccgcctcagcctcccaaagtgctgggattacaggcgggagccaccgcgcccggctatttccccttcctttgaacctgatcaggacttgacgatggcatcaacatggtgagagtgaccctgcatggcttatgaggctgggttacacaaggcgatgttgcttctgactggctccctctcaggatacatgcccttggaacccatcctctaagctccttgggagcccaacttagcccatgtggagacaagacagggagagaaacagaggcacccccagccctcagccagcatcaaccgccagacaggagagcaaatgcgccaacaatgattccagctgaagcctcagacagcgtggagcagagatgagggatccctgcagattgcagatgcgtgagcaaaatgcatgctgtcactgttttgaaacaacaatgtctgggggctgtttgttatgcagcaatagacagctgtaacaatgctgttactgctgtattccatgaatgactgcactttgagtagcagggggctagatcactagataagccccatggcttctgtgtatgctatttttctacttttatatccttttcattcactttttttttttttttttttgagacagagtctcactctgttgcccaggtgggagtgcagtggtgcaatcttggcggactgcaacctccacttcccgggttcaagcaattattgtgcctcagcctcctgagtagctgcgactatagatgcacccccatgcctggctagtttccgtatttttagtagagacggggttttgccatgttggccaggctgatctcagactcctgacctcaggtgatccacccaccttggcctcccaaagtgctgggattacaggcgtgaaccactgcacccagcctcattcactttctttacttggctcatttttccttgttgcctcaattctcctctaagatcactttcctgacatttcagcctgggcctgttgccttctctgggtcccctccgcctcctgtgcctcccccatctcagccttgatccctcagattatacttcctctgtccccaccctgaccatcttggctgtccctggatagggatgggtatcttctcccactggtctgggagatctggaaggacaggcctggaaaagacttggtcactgctggaaggagctcagttagtgtggtgctgaggacagtacgggtgaggctggccccttcacccaaactcccactctcttccatagatttcacctctgtggcccaggccataggattagggcaactccccttaaacatcgagtccatcctccaagctgtccttttttttttttttttttttttttttgagacagagtctcgctctgttgcccaggctggagtgcagtggcgcgatctcggctcactgcaagctccacctccagggttcactccattctcctgcctcagcctcccgagtagctgggactacaggagcctgccaccacacccggctaattttttgtatttttagttgagacggggtttcaccgtgttagtcaggatggtctcgatctcctgacctcgtgatccgcccgcctcggcctcccaaagtgctgggattacaggcgtgagccatcgcgcccggcctcatgctgttcttgaatagtgagcacctgttacaagtcgccccaccagcctctcacttgtacccccctcatctctttctccccaagagacagaggaccctggcacttgtgaagcatgacccagaccctggggccatggcatccaacatcctcattccccatgacccctactgtctagatgtagctgccaagagacccccagactccccgggcctctgtctagagtgccaagacagagagagaatgccctgccgcttgcatgctttgtggggtgtccttcccccttccctggctgctaggcgtgacttcaacgttctccccaacccccaaacagcagcactgacaccagctgcagacctggctcaggttagctaatgaggaccaggctggggatggagcctgaacccctaaaccccagtcctgtaccccaccctaatcctggggtctccactggacaaaacgaagcagcttggtttttcgttgttattgtttttgagatagagtatctctctgtctcccaggttggagtgcagtggcgtgatctcagctcactgcagcctccgcctcccgggttcaagtgattcttgtgccgcagcctccccagtagctgggattacaggcgcgtgccaccacacccagctaatttttgtatttttagtagagacagggtttcaccatgttggccaggctggtctgaaactcctgacctcaagtgatttcccagcctcggcctcccaaagtggaagcggcttatttttaaggagaaaactcccgtggaaaggaatcagcacctcctctgtcaacatttcacttctctgaaaagactctcacttccaacagaaagtgctttgtaacacaacaatgaggctgggcgaggtggctcatgcctgtaatcccagcactttgggaagctgaggcgagtggatcacgaggtcagaagttcgagaccagcctgaccaatatggtgaaaccccgtctctactaaaaatacaaaaattagttccgtgtggtggcgtgagcctgtaatcccagctactcaggaggctgaggcaggagaatggcttgaacccaggagatggaggttgcaatgagccgagatcacgccactgcactccagcctgggcaacagagtgagactccgtctcaaaaaaaaaaaaaaaagaatgagaacatatggacacagggaggggaacaatacacacaaacaaaatttagaaacaggtgaaaataattttagtaatatttttactaatactgatatgctcaaaatattattatttcaataagtaatctaaaaattattgagatgtcttatgttcttttcatcatactaagcctttaatatttggtgtgtattttacactcacagcacatctcaatttgcagtccccatgtttcaagcactaaataaccatgtgtgtccggtggctaccatactggacagcgttgatctgaaatcgcatctgtatgcatcaccagcatatttgcagagatccccatctcagcagcacacctgaggctcatctgcgaaagcacctgcaacttctctacaacctcccacatcacctccaaacacatcctcatgtcatctgcaaacacacccatagctcacaggccaatgcctaaatatcattgcaggcaccttcagagaaagcacttactaaaggggtatacttgattccacatctgctttgacctgcaaatctcccttctcctttacatacatttgcatctcatttgtatgtcaatctaaatccactggcagagcctcagatcatcatctcaaagtcaggtggatgtggggctgggcaggcctccaggtgttcctcctcctgcttcctctggggctcttgatcctcctcctcttccttgctgctctcctcctcctcctccaatatggtgaccagttcctcccgcagcgcccccatctccagccccaggctgcacagctgtcccagcagctggacatccactcggcgcaggttcccctgccagtaggaaggggacgtcacagggatgccaccccagagagcaaggggtctctccaggacctgggtgagagcaggtcccaactcatgtcctggccacagcgcctgggcagggtcctcactgtgcccatggaccctaactgccttcctgcttctcagagtgtctcttgatctctaactcttctctttgtctctccatttcattgtccctgacttctctctctctgtctcctccctctcttatctatatctgtccctgtttccctttgtctctgtccccatttattttttgtctttccatgcccctgtctctctgtctttatgtgttgccatttctctgcccctgcctttggctctctttctctcgcttgccctctctctgccctccccaactttctcaaattcagtctgtctctccatctctgttcctgctctccgtctctgcttcccacctctgtccctctcttttgggatctccctgtccccacctctgttcccgtccctcactctatgtctgtctctcggtgtctgtacatgcctctcatgtctctgcttctatctctcagattctgtttttcgatctctggccttctctatttttgttcatttccattcattctcatttcctctctttctctttcccttccaaacccctcactcaccagctcctccctgatccacagcagactatcgcaggcacctccagtgtctgcccctgcagtcctgagggtctgaccagggatttccactggggagacctccctcagggcctgggggggtgggcccagccccggaggcaccagtccagcctgattcagctgcctccacagttccatcgtctctgagctatggctgcaaggagcaggaagtagcaaggtccagggtggcctggtcccctggggagctgtgtgcgtggtggagagtaaagggcagagggagtgggatgggggttcctgggaaaggtatcccaaagtccactcttcagagagaatcagctggccttgtgcttttctttttccttctgaagtctaacctcaactctgctcacagggttcaaacatagcctcttgcagaggtctaactccacccttccctgcctgtctcaggcctgacccctcaggggcgctcagtgtctgtagatgcctggcaccctctgtccttccacctgccccccaccaccacttctccagcctctcctcagcctccatttgacctctggcttgcccatagcttggtccttgcttgtcctcttggcacgggtcatcctagggctttcccaccagtgtgcctttgggggcaggaatggctcccaggggcaccaagacagcaatcccttagctggagtgcctgtgtccaggctgctggcctagggccaagcagccaattctgctgaccctggacttgcctatgggtatattatccctgttgagggtgagggcttctgctgtggaaaagtctgggaagcactgcaggcctctctcggccttggacccttccttcagacccaaggtgcatatatatacatatatataatggtagatcacgaggtcaggagatcaagaccatcctggccacatggtgaaaccccgtctctagtaaaacacaaaaaattagccgggcatgctgccgcgtgcctgtagtcccagctactcgggaggctgaggcaggagaatggtgtgaacccaggaggtggaggttgcagtaagccaagatcacgccactgcattccagcctggcgacagagcaagactccatcttaaaataaacaaatgaacaatatatatatatatgtattttgttttttgagacagagtctcgctctgtcatccaggctggactgcagtggtgcaatcttggctcactgcaacctccgcctcccgggttcaagcgattcccctgcctcagcctcctgaacagctggggttacaggtgcacgccaccacacctggcgaatttttgtatgtttagtggagacggggtttcaccatgttagccaggctggtctcaaacccctgacctcaggtgatctgcccacctcggcctcccaaagtgctgggattacaggcgtgagccaacgcgcccagccccaagtcccttttaccatagaaagtaacatagtcacagtgcccagggattcacaggtatggggagagggttcgttattcagctgccacacccaccttcctaaacctgctgcccttccagtttcctcacgtgcacagccacgcccgtctgcttttagtttctcaatctgttggcttaaccttcaaaacaggcccaggatttgagcacttctcaccattccctctgccccatccccattcatctcttgcctagactgctacagcagcctcttttactggtcccctgcatccacccttgccctctaaggcaagggtccccagtccctgggccaaggaccagtaccagcccctcgcctgctaggaactgggccgcacagcaagagatgagcagcgggtaagtgagcattaccgcctgagctccgcctcctgtcacatcagcagtggcattagattctcataggaggcaaaccctattgtgaactgtgcgtgcgggggatctaggttgcctgctccttatgagaatctaatgcctgatgatctcaggtggaacagtttcatcccaaaaccatccccaccccacccccgacccccagtctatggaaaaattgtcctccacgaaaccagtccctggtaacaaaacggttagggaccgctgctctaaggtacattctccacctggcagaaataatctttacaaaatgtaaatccgattttgacactcccttcttcccactgtgaatagaataaaaccctaccaggcctgcaccgtcagcccctgcccacctctcaacccagtctcctatctctgtctgcaagctggttcccacctcaaggcctctctgctctagaggctacctctccctgcagcgcttttcccctagatctttgaatggctctttccttatcattcacttctacttcaatgtcacctcttcagagaggcctttgctgatggccctacacccagtcacttttttttatctgcttctcatcaaaattgccttgctgattcctttgtttcttattcatcctctcccacatccatcctctcccagcccagaatgttgacttcctgagagagggactgggtctgtcctgctcaccatggtaacctcggcatctagaacagtgcctgccatcacgtggtaggtgctcagtaaatattcttggaactaatgaatgaataattctatccacaagacttcacaatggctcttcatgctgcgatctagctttcaactccaaactggtcttgagatctcacctcagtctctaaccttgacatctaacctcttcacccactctcttacctgaccctaatttttaaaaatgacgtggtcagcttttcagccccctcattccctgtttttaggaggtagtgagtggaagctggaagaataagaaagcttggggagactgcaattgcagtcaggaaagaaaggtactctgccgggaagaacaccccatcttctcctagggaaagattgtggagtcctggggtttgttttgtttttcaattttttgttttaagagacagcgtctcgctctgtcacccaggctggagtgcagtggcgcaatcacagctcactgcaacttcgacctccccggctcaagtgatccccccgcctcagcctcgtgagtagctgggaccacaggcgtgcaccaccacgcccggctaacattttattttttgtggatataaggttgccctatttctttgtggagataaaggctcccctatgttgcccaggctggtctcgaactcctggcttcaagcgatgctttcgcctcggcctccacaaagtgctgggttcacaggtgcgtgagcccgacctgtgtctcgttttgaagctcagggagagggcgctgtgagcaatccctaaaccctttaagagtaaaaagtgcgtgcacctttaagaggacggttagaaaacgcggggcgtggccacaggagaataagttcgcgctgaaccaggagcgtgggataagaccggccccttccggttacgaaaccttagcaagatggcggctccctgggcgtccctgcgcctggtcgcccccatgtggaatgggcgtatcaggggcatccatcgcctgggtgcggcagtggccccagagggcaatcagaagaagaaaaggacaatactccagttcctgaccaactatttctacgatgtggaggctctgagggattacttgctccaaagggagatgtacaaggtgcatgagaaaaatcgatcttacacctggctggagaagcaacatggtccatacggcgcaggtgcctttttcatcctgaagcagggaggcgcagtcaagtttcgagacaaggagtggatcaggccagataagtatggccatttctctcaggagttctggaatttctgtgaagtgcctgtcgaagctgtggatgccggtgactgtgacatcaactacgagggcctggataacctccgaacctccgcaggctggacatctcggacctccctgccgtgtccaaccctggcctcactcagatattggtggaggagatgctgcccaattgcgaggttgtgggagtcgactgggctgagggcctgaagtcagggccggaggagcagcctcgggacacagccagccctgtccctgcctagcctttagccctgtccccactcacgtggcttctcagcgggctgcatggaatgtctggtagctcaccacacttctggcttccatttgtcttcactcaacgtcagggtgggggagtggtgctggccaatcacaggagagagcgtgagttcccagtatttattcctggctgcccttggctaaaggtcacagctcctgtcaccctgtcaggcagccctttccatgcccctgttcaggcctggggaggtaaaggctcaggctgttagtagccgcagagagccacactcaccttgtcaggagactcttctcaaactgtccttatgtgagtgcactgccatttcttgcagggaccctgactgacacaggggctactactgacactttacagggatggttctcccccgtgcagggccgctgtgcccactgcaggacatgcagcatccttcgccccactccactcactaaatccataaccagcaatactatggggcctgctagttctagatcgcgagcggccgct

SEQ ID NO: 735317 - DNA, 187664 bp, Homo sapiens
ctccaaggctgagggatgaggagacctgctgaggacccagggccttatctttccatcccactccataggtcccagtattgactgatgctgtcttcacctcctagcctcacttttaaccttctggcacccgcccaccactgtccagttcactattgaagccctgccgtccagtgctgcagagggaaaggatgttcttctactggcctgcaatatttcagaaactattcaagcctattattggcacaaggggaaaacggcagaagggagccctctcattgctggttatataacagacattcaagcaaatatcccaggggccgcatacagtggtcgagagacagtataccccaatggatccctgctgttccaaaacatcaccctggaggacgcaggatcctacaccctacgaaccataaatgccagttacgactctgaccaagcaactggccagctccacgtacaccgtgagtgattcccccatacctctgggtgctggcggtcagttctgcttcacacacatgagattgtcaggcctgggctgtgcctgcatccccctctgcattttgtcccgtgttgagatttgggcatttagtgcaggacacacacatggtaggtaaacttcaacagatcagaattcctttcctgcatccaggccctgcagacactgatggcgggggcgggggggcctcagcagggggaggtcagtctcagccaagcaccccatgccctccccatgaacctgaccctgagaaagaccctggagaactgggtcagggcctggcctgagggcgtcctgggaacctcacaaaagcccagcctcaggactcctgactccgtgtgaccccgggaagcctgtgtcagggctggggtgtggtctcctgggcagggcttactgggagcaaggatttaccagatgtctgcgggctgtggttcctgaagcttctcatcagtgagggctcagctcccagagtctcatctagacaaggacagagcctaccactttccctgggactcagcctggagagggcagggggacaggattactagggcattggccccctgaatgaggagcttaagagatgcccttgggcagtcagtggcccaggggtaggaacagaggggagaaaatgttcctggcagcttcttgtccaccggggatcatgcccaggggtgctctcccatggaggcaaataacagatgctgttgatgtgaacacctcctctgtgccaagcttcatgtcagatcctgtgaataatttaaagttcattcacagacaaagtggcaagcctcagaccattttccatttacatattgtatggaggggaaactgaggcacagagagatacagacaccggccacggtgggcagatcgcagctggcagagtcacatgagggctgtctgcagctgctgccacgtcctctccttcatccctggtgccttactaggtgtctgtggaccttagaacagccactggttcggatgttttcttcttaggtgtctacagctcggagggggagattctggtctggagagttatgagtaaatacagaattaatcagttttttcttaactaaatcacctgcctcaacaatcagtcagtgctggggaagttcaggcctcctcgctcaggtccacaccccgcatctctggacatgaaatggcttcgtgtgttttctgatgtgtgggtatcattccaacaggaggataaaggggaggactttgctttctctccccattcacaccctgcaccagccagggcccagtgtgagacacatactccgtagttctctcatgaaggagggagggaatgaatgaaggaatgatctataacctcttcagagacagagacctggatacaagatcctaggaggttctgggcccaacgtgagacacacactctgtagttctcttatgaaggagggagggattgaatgtaggaatgatctataacctcttcagagacagagatgtggatacaagatcctaggaggttctggccacacctgttttctgtccctctagagcctaagacccatgtctcattcatctggcccgtttctcctaaatctgcccctgggagctgagtctcatctgaccctggggctgcagggctgtgggaaggttttcaggggagggatcaggcttgcgggtagtcccacacgtttgccttacaccctggagctctacctggttctcactatgaatatcccataataatcccccctatcctttctggggagtagaaaaaaagtaaatatttaaaaatatgccagagcatctgttcttcttagcaagttcagatagttattagttagcaggaataaatcgttattttaccagagcctcacctgctgggggtttatgggagcctaactgactgaggggggtgggaaatatccaactccagccccctctagccatcatgtcccacctaaaggagagaaaaaactgagaggcacttgtgacattcacagcccagggcacagactctatccaggaccacagaacccctccctccccccactcaccaccgcatcactgaacgcctgctcacccaagttcctgttgcccagtacatcatgtcctggctttcaacaaaaactacaagacagactagaggcaaaaaaaaaaaaaaaaaaaatgcagttcgaaagacagaacaagcatcagaaccagatgcagatgtggcagggatgtggcagggatgttgaaattatcagaccaggaatttaaaacaactctggggccaggagcggtggctcatgcctgtaatcccagcatttgggaggccgaggcaggcagatcacctgaggtcaggagttcgataccagcctggccaacatggcaaaaccccgtctctactaaaaatacaaaaaattaggcaggcatggtggtgggtgcctgtaatcctagatactcggaaggctgaggcaggagaattgcttgaacctgtgaagcggaggttgcggtgagcctagattgtgccactgcactccagcctgggcaacagagcgagattccatctctaaaacaaacaaacaaaaaacaatactggctaatatgctaaaggctgcaatggaaagcatagacaatgtgcagaacagacggatgctgtgagcagagagatggacaggctaagaaagaataacaacagctactatatctatctatctatctatctatctatctatctatctatctatctatctatatatatgtatatatatgctagagatcaaactcactgtaacacctggatctcagagtggttgtgaggatgtttattaggagattaaagagattaaagcagagttatacacagggcgagagctcaactgatgctatcaactagtattcttatttttttgatgttgttattggcaataaaatcaggaacaatgcagtaaaaatttggttttatcatgtacgagttctgtgaccttccttgacttactgaggtactgtaagtctcagattctaactctgcagatggcggtgatgcccctctccctcaaggtgatgtgaggatgagatgagctgtaggtaggttggtgcccactgtgcctggcacatggaaggcccctgaaaatagtcaatgaacatcatccccgctcatcagcatggagttgacagtgagggctcgctctctgtgacaatcatggaatggaaaagaagaaacaagaggaagactgggcgcagtggctcatgcctgtaatcccagcactttgggaggccgaggcgggcagatcatctgaggtcaggagttcaagaccagcctggacaacatggcgaaatttcatctctactaaaaatataaaaattagcctggcatggtggcacaaacctgtaatcccagctacttgggaggctgaggcaagagaatcgcttgaacttgggagatggaggttgcagtgagccgagattgcgtcagtgcactccagtctgggtgacagagcaagactccatccaaaaaaaaaagaaaaagaaaaaagcaacagagggaagaggtgtgacatgagaggaagaagggatttaaaggtacaggagcagggcgaggtgcaagcacctgtgggagaatgtaggagttggtacatcccagtgtgtcaagtctgagacacagaaaatggtgcaaccgtggagagcaagggagtcagctatgaggacagcccaacagaccacactcaggctctggagcatttccttcctccctgactatgcccctgccctgcaatgccccttatggtttcccttggaacaaacttgggccttgtcccctttgccttcccctttctgcagaaaacaacgtcccaggccttcctgtgggggccgtcgctggcatcgtgactggggtcctggttggggtggctctggtggccgccctggtgtgttttctgcttctctccaggactggaaggtaccgcagcttttccccagcctcctcccacccctaggctgaccccagtcagggaggagggagaccccgccctgtattcagggccaggctttccgcatcctcccaaggaatccttccctctcattccatggctcctcccttgccagctgctgatcctaggctgcctcttcctttatgaatgtggcacagttaaggttgcacccctgagtgctgtcctagttccctaacacagcaaagccacagctgcctggagggaggaagggagggagggagggagggagataagacgggagtgctcagaacctggtaccttctgctgttcattgaatttacccacccagtgaggagggatttgcaggcttgagatccatggtgggggtcctgggcatggtcacgcagtggggagtggcaaagcctggacaggctgggtagggtcagcaccccatcgtgattgatgtccctgaggtgtgagatgggagaacctggacctcaggacctgctgtcctttatgtctcttgccaaggggtggagagagagaggacaaggccattgccccatttcagcatctccaggcctgaaaggagggtctggccatggcagggatactgagttctgggagaatatgatacatgctccttgcctccccatgcccccagctcccccagtgtcctgcacacacagccggccctgctttccctctggggccttgacccttcctctcaggcaaacgcaggtggtctgattccctccctgagtcctcagtccctttcctgggtccctgggtcaatgttctcctcacccggcatctgcctgggggggtccttcctctctggccaggacagacgtgactgcttaaggcctatcctcagctccccgtcctcggccgctcctaccacgaaactgatggagacaggaggccttcactccagtccttgaaaatggagtcccttccttgtcctttattctgcccctaaacctgtgatttctccctgcaccctcatgaataatcctgacctttcctagggccagcatccagcgtgacctcagggagcagccgcccccagcctccacccctggtgagtgtcccttcagcccaggtgtgggagcccctaggcctgccctacggtgtccactcctgccagtcaccccctgggggcctctgaccctttctttggggctgcaaggaggatgtcaggaaacatgacacaggggaccccgactgtcttgttcagactgatctgtgggctctgggtcgtgggtcacctcctcgacctcagctgctcaggtctcccctgggaagaggctccctctccctgattctctgggagctgaggacccctacactctcctgcaggaggggcccaggctctcctcccaccctgctgctcactcctgtctctgtccccaggccatggtccctctcacagatccaccttctcggtaagcctgttccctccccagcccttttctactggggtcccaacagtgcaggctcagggcagggggaccatcaaccccacagcacagcactgacccacctttccccagaacagtcaggtcaaagtgagtgcctccagccaggatccgggcctctctacagggccaggaccacccacgccatgtgctgacccctccccgggaccctctacacctgaggagaaccctggagtccagcaggtgcagaatggacactgggaccatcagtcagaggcccacattaacaagggtgcggggtgggcccagccaggacaggggtcagggtgttgtgtccacactgggaggctgagctcaggggcagagctggtcaatcctgaggggaaatgagtggaagtggaggcagggaagtaagtcctggccgatcagagacaggaaccttccaggctgggcttccgtgaccctccctccctgtcccctgacatctcctctctcccctgcccaggcccctctacccagccccagaacagccactcccatctatgaggtgagtgtgggccatggatgttctggtcccgcaggctccaggggacccaggatctgcccccaccagcacctggctgagctcagattcaggaaaatgcagtgaaaatgagaacaggtggtggtgagcagaggagggaggggcctgggaacagggaccccctgagcacagccaggttcagccccagagaagccctgggtgggcccagagcctgggagatgccagacactgttctgagaaggctacaggggttgaggcctcttctctgtttttacaggaattgctatactctgatgcaaacatttactgccagatcgaccacaaagcagatgtggtctcttaggttcctctgggagctgctcttgtgggttgatggagcgtccccaaagctcccagccctggggacggggaaggacatggagcctgagccagagaaccagctctgagtcctgaggagacacaggcctggggacagggagggatgggagtccctgctgaatatctggagaccctgacaggttgccctgggctctgggtgggccgggacaaaggcctctcatcaccacaggaagcgggggcttgcaaggaaagtgaatgggcctgtggcccacccggggtcaccaggaaaggatctgaataaagaggacccttcctctcattggctctttttctgctcacgggaacttagcagaaactcacctgaaactccgtgtccattctctcccgggtcacacagggaaaatatctccaccttgtctcaaccacagtctctcttccctgggaggcagaaataggggttgggagtcaggctggggtgggccctacacaggaaagggcaagattcacatgagccctgcccagccagccgagcgctcagctgtcctcacactaccccagggaccaaggccatgcacagccccagcctgggtccctctgtgaatgcatgtggggtctcaggagcacagaagatggggccatctgatgtccacaaaaggtgagcaatgcgggagcaaccatgggtggtataggttgcggctgtggcccctacgcagcctccagtgtcctgacccctgctgccctcttcacccaggccctggaggcccagtctatcactgtcctccacaaatgaacttacctgtccccaaatccaggatcctgtgtgcttatacctggccactaggttctcctctgtcccagtggctactgctcaggacatctttatccctggtggggcacagagaggggctgtcagagcaaccaagattaatacagacgcataattcagtccttgagcactacccaggactctggcccctcattgctcatcagttcccactttaccccctggcatggatctcactgagcaagccaactctttacacaggagcatccaggtcagaggtgcaggactcccccatctaaagctcatgcaggctcccatggcgatgggacaacctgtctgctcctctccctggcccacagccctatctcgcctgcagctcctccacacacctgggacagcagttctcagcccttccctgagggcccctggaagggtgatgatctcatataggttcacttgaaccaggtgccaccttcccacaagtgagctggtgcctgcactaaagcacagagccacagttcccaagagtgttctgccactgccacaggtcccaagagtgttctgccactgccacaggttgttcgtcctgagatgagaggtaagaaaacaacccgcaatgggttgttttatatcgggatttgcatcaggatttagctctaaatgacccctgatcccacctgcacacagcgtcagatgagacaaggtgaggcctctttagttttctgttgaggctgtgacaaattaccacaagcttagtgacatagaaacctgaaccaaagtgcccacatggctgtgttctttctagaggctccagggaagagtgcatttcctctccttttccacctcctagaggcctcctgcaaccttggctgtgtcctctttctccatcttcaaagccagcagcacagcatcttgaaactattctgtgccctgcttccatccccacatctccacctcctcccacctccctctctcacttaaaaggaaggagccttgtggttattttggacgcacctgggataaaccacaacaacctccccatctcatgatccttcctttaatctgtaaagtgtcctttaccacgtgacatgtccacagatctggggatgaggatgtacacatctttgagaggcccttgttctgtccatcactcctctcaaggccatcttctcatcatcgttcactacaaactacacatgggcacctggatgggttcatcatgactgtggcgtcagttcctgcattaacatccccagcaccctccagatcctgagagagggagacggagggctctccatgcccctagtacctctccaccttcttcttggtgacatgcttagttgctaagaataacagaaagcggaggtgactgaaagatcacaactcaccggcccttcaatagttcgtggacatcagcaccacggacagtgactcagtgaggctaatttccaggtggcagcagggagcatgcagataggagggaactgcaggaaaagctgcccattctattctatatgagaaagagtgtaagaaagaggaagctattacagggataatgctattcttctctaatccataaattgcgaaacctttgcatgtctggatatcatggtttttagcacatctgctgccactccctgcagggctgattgctgcatccaggatgtggtctcttggggggctcacagcctgctttggcctcatggtgagtctccctgcccctgacactcaggccactgtctctgcctacaacatggtgggaaccttccatgattaacgtctgattctctgtgcctgacctttgaagcacatccatcactcagcctggagcatccgctgagctcagcatcctgctcctccatccccagctgagcccttgaggagatgcttgagaggatctcctgggctcctctgtgagctcctccaggctgagccttgtgcttggtgtcagaggcctttgccatctgcttgttctttccataggcaaataatcctcctcagggacaagtggggcctgaagatctgtctgaatatctatctatctatctatctatctatctatctatctatctatctatcatctatctatatgtatgtatatatgagaatgctttattaggcaaaactgcatactatgaacatgctttaaaatgcaacaggatgagatgtgaagacataaagaacaagtgtgtagtgacacatggctatcagaacacactgaagaatccacaccgcggccgagagcagtggctcacgcctgtagtcccagcacttttggaggctgaggcaggcagatcacttgaggacaggtgttcgagaccagcctgaccaacatggtgaaaccccatctctactaaaaatacaaaaaatttagccgggcctggtggctcatgcctgtagtcctggctgttcgggaggctgaggcaggagaattgcctgaacctgggagacacaagttgcagtgagctgagatcgcaccactgcactccagcctgggagatagagtgaggctccatctaaaaacaaaacaaaacaaaaagaatccacactgcttccccgcttcactttacccagaaaaggaatgttctaggccacttcctcttcagcacacatccccagggaactaaaataggttcacagtcacccccatcttcctcattcccatcacctcttacccacagaggcatctctggtcctacagatccagccctgccttcaagaggcacaggtccaacccatccagtgtccctgctagtcacacacagcactcagggtacaatggagggcttctgtgctttggatgggaacaaaccccacctcacattcccacacctgagaagccaccagggtcctctctgtcctgtcctcacactcaatgtctgtcctgggtcacccttgtcatctctcctggaaataggcatggctcctgacaggtaggattgaggctttgtcttttcaggagtccctcccactctgagcacatgaaactgctcagctccatgcaaccctctctcaccaggggccttgttctctgggtccctgaatacctgggtccatgccatgtacattttaagaaaaatgacagtgactctcaccctgacatcctcacccaaggcacgtgtctgacaagaatcaccaggtgagatacctgtggctccacacacctgaggcttcactgcgcaggggtgtcctcatccctctcctcccacccctagggacagtaagcaccacaggctgccttggaccaccagctccccctcccagacacagcctcagatctatactgacatgctacatggagaggctctgatgaacagcaggtattaggaaatcccaccgaaccaggtgccacttgcggccccactcctcctcatatctgtgactgggacagacacacataacacacctctgttcaccgcccagcccccaaggtcaatcacagtctgcttctcccctagatccactgctccccatgtcttccgtcctcagctgcatcctgggtggcctccttgctgttcttgtaccccagaggcaggttccaacctttgtgatgttgcctgcaatgcccaaactttcccttccccttccccttcccttttcccctcccccttcccctccccttcccctccccacccctatcccttcgtcttcccttgtcttcccttcccttccctataaagccaaacatacccatccacctaccttgtggtcaaagtcatcagcctcctgctccactcagtgttctctgaccctgcatatggaggtggtggcccctcctagaacacccaccactcactgtcagccttgcgtggtaatcacagattttgcaggggttacctgtgttcaggtgtgtcacctgtggaaccagaactcttggaaggactggcagagggagctgcttaggatatctcagggctcctggcatctggtctaccacagggctattaacaacagcacttagggacaaggtggaggatggacggttaagagggtaaatatggatgatgtgtgggcaaagaataggacacaggaacacatgcagtactcaaataattatgccaagaaaggtgaggacatggagatggacattcccatatacttctgatgggactgcagtttagtccctacagcaacattgacctcatcatgtttaacgcgcacacgctctgaccactatcctacttctgaaggcctccctgtgctgtgagctctgagaaggccaagcttgcctgttctgtctctgctaaagccagagaccagccaatagcccagcacagggtacttcataaatacatgttgaaggaatgagctccaggaacagtactccacatggtagagatgtgtgtatgaggatgttcactgcagaaggtcatgtcaatgtgacaagtgacgagcagcctcaaatccagcaacaggggtgtgggtaaaagatcatagtgtagccatgcaatggaaccaatgaaaaaaccacaattagagcaaatccacatgtattaataaaggaggtgccctccatacatgctgcacctaacagaatgttgccaaataagaatgaaaaatgatgatatttgggctgtaaaaactagaagtcagctaaataagaatgcatcgaaagtatttgtgaatgcttacaattttataatgccttggcatccgttttggatggaagttggactttctcataccagaagcagggctcagtcacctttgaaatagtttccagttctccacctccttccagttcctcagtgtgattgatcagatatctgatttatacaactgcctcctggtgacctcctccctatgggacttccggatacagcccgtatgactgccccactgaccccacaccctgcctgctgcagtgaccacctctaattacctggatctcatgtctgcttgcattaaatccaccaattaaaactccctgaggacaatctgtttgaataatattctgtaccctaataaaggccttgacccatgggttccccctctgtcctccccatactgcccctgacctctgtgtgtgtgtgtgggtgtgggtgtatgtgtgtgtgtgtgtgtgtgtcctccagacagggcctgtatcccccaggacctgtaagtaataaatctttattttcatcttatgtctctcgcaatcattggcaagagctctgcatcttaaagatcgcaaatttaagaaattggtgtagtcggcacaatagagtacctcttctgtttagcacaagatatctcggagctgctgaggcttttaacatcctcgccggtgtggctgcctcactggtgaggccgttctgttcagtgcaattcagttgctccactgtgtgctgctgtgttgctgctgtagagtgctgccatgttgttctccccaaattgttaccgagtaggaacctgtaatgtgctcccaaggtggtctaccccatgagaagggggattctccatctagggcaagggctaggtgtgtttctggaatcctaatagggaaggcatccacagagggtgaactccactcctccttagagtgaggagtgacatttcccatttattttccccatggaggtgccatgtattgactttttctttcactgtcccaaggttgagccaaggtgagctatggagaccagggcaagataccatttctgttagcaaagcaaatgggtgacaacgtgtggagaagctgtggttctcctgatggatatagcagagtgccatttagtaaaatcttgtcaggaggctgcccctggttagaccggcagtgtctgtagtcactaaggtggatgcgaattttaggccctgggccatggataatccctgcagacacagccgtggcttcatgtgatggggcaatcccgggctagtggctcccttgtttctgcatttcttgctgtggttgcacaatcaacacctcaggggttgattgggtcaccttggaaagagaaacagctgcctaggaggctggtgcacatggaggccaccctcaattttattctgctaacaagttgtaagattaaaacaacagggggctttgggtaccatcaggaacttgtcaagtaaacatccaaagacagaaagaagaaaaagaaaaagacattaaccgtctagaaatacaagccattttaaagattttgcttaaaagatgcgcttgggctgggagcggtggctcacacctgtaatcccagcactttgggaggccaaggtgggtggatcgactgaggtcaggagttcaagaccagcctgaccaacatggtgaaacctcgcctctactaaaaatacaaaaaattagcagggcatggtggcaggtgcctgtaatcccagctacttgggtggagaatcgcttgaacccgggaggcagagacggcagtgagccaagatcgcaccactgtactccagtctgggcgacagagtgagacttcatctcaaaaaaaaaaaaaaaaaaaaaaaaaagacgggcttgtttcgtcgttgtggagtcatcccagagagaggctactccctagagtcactgaccacctttcctcctccatcttttcctcttatcattctagagacagaaaacaagaatctcagctttaggtggctaacctcaccccccaagaaaagaaactaccactttgattgactacaaatccaagaaaaataaaagagaaactttaaaaagtactgagcaaaccacaggtctagcaaacataatgctagccctaggttacttattcatttacaacaaacccctagatataggaggaaaaaataaaaggtaattaaatatatacacatacaatattttaatataaatatataataaatagttaaattatgtatgtataatatgtaactaaatcaaagtaaaatttcatactttgattctattggaaattcaaaattcatttattaacttatatattaaggaatttatgtaaaaaaagatttttaaaagggcaccaatttgcttttgtgtctctacaacataggatctaatttaactttacatttgctaaatacactaattgacaaatattcatggatttaatcaatactggggctcaaattgtagccacacgtgggaatcccataaatttaaacactctgtccctattatcttgagaagaaaactaaatataaaattgaaaaaaacaggtatgtctcaatttacctgtaactttgcctaaatttcccggagtcatatacccattgctgtaaaacattctctattggacataggtgctctgagacaataaataaaatagaagtgtttttggtacttagacattggcttgacaaaatgggatcccatgaaacctcagttaagatagtgaatacggcccaatgtgagttgaaatggggcctttaaggattaaaacttattacatgaaacctagtaagtaatggggtgattatccatactgcttctccatttcatagcccaattttgacagttgtcaaatctggaaaaaacaaacaaacaaacaaaaaaacccctgggaatctgttgcctcacagagacacaaagtagacatcaaaattgtatatctcagttccagttccaaaatggtggcatagaagcaagctggctttactccttcacacagaaaaccaaaaacaaatatacagcaccaaaattattaccagatatattccagaactcaaatatgaaaatgaaacagttttcagagccacagagaagtgaaaaaaactcccgacagatgacaaaagaatcagatttccccatctgtaatgtccctccctgccccattctgcctggtaccaggtgtgtggaaaattttaccccaactcatggtttctacactgggaaatgtaagatcaatgcgggcaaccagtttctgcacaatcctgggttccctgtccctgccttaacccacaagaagcattgtgagtgcccgaagggagaaatttccctgaggacagtcaaagagtggggaggcaggactaccatctccttccctggaaactctgctgtgtaactcagccaagggagacatgaaatcagactggtgtttcagcagctccatgttgtagtaggtttgtttcacaggtatcctgggcatggacatctagccagctttcccacactgccaggatatcccctttgggacctccctcagttaggaagggcacactctgatcatttactagggccaaggtaaaccctaaaggtaacttagagatgaaaaggaggtagtgacctagcagtaaagaactctaagaaaatctatccaataaaaatcaaaacaagccagacaaagactaaaataaataatgaatccttcaatgtaaagacctggacttacatccacaagaaacagtaagcaggtaaccatgatctccccacatggacaaagtgaggaacaagtgactgatcctgatgagatggtgatgtgtgagctctctaatcaagaattcaaaactgcagttttaaggaaactcaatgatcttcaagaaaacatggaaaagcagttcagaaatttatcagagaaatttaacgaagggattgaaataatttaaagaaaacaaacaggaatcttggaattgagaaatatatttgctgaacaggaaaatttattagagtctctcaacagcagaatggatcagaggaaagaatcaacccaaataagactcccccaaggcataaaataatcgaattctcaaaagtcaagggcaaagagaagattttaaaacagaaagagaaaagaagcaaatggcataaagaagctccaattctgtggcaacagattttcagtggaaatcatacagaccaggagggagtgacatgacattctcaaaatgctgaaaaaatattgacatttgagaatactttatccagtgaagttatccttcaatataaaggagagagaaagtttcctagacaaacaaaagctgagataattcacaccatcagactagtcttcctgtaaatactaaagggtaaatactaaatacttcaatgtgaaagtaaaaaaaaaaacactaacatgcaaaacaaccacaacaacaataacaacatttgaaggtataaaatccactggtgaaattaagtacgtagacaaacccagaatactcaaatagtaattgtggaaagtaatccaatcataactctagcatgagtctcaaaatataaatctatcaaaaacaataatacattttaggaggccaaggttggcagattccttgaggtcaagagttcaagaccagcctggtcaaaatggtgaaaccccatctctaccaaaaaatacaaaaatttgcagggtatggtagcacatgcctgtcgtttcagctatttgggaggctgaggcaggagaattgcttgaacccaggaggtggaggttgcagtgagctgagattgcactactgcactccagcctgggtgacagagggagactctgtcttaaaaaaaaatagctacctgtttggagaaaggtaatataaaatatgtaaatagagacaaagtcaaaatttgcaaaggatgaaattaaagagtagagtttttttggggggttttctgtttctattattttatttgtgatctaagataagttgttaccttttcttctcttgaagatactttgttatatctatgtttttggaagtcttatggtaactgcaacgcaaaaaatctatgatagatccactgaaaataaaaaacaatgacttaaaacatactaccagagacaatcaaccacaaggaagacagtaaaaaatgaagaaaggaagaggggagttacaaaacaaccagaaaacaggcaacaaagtggcagtagtaagttcttacttaaaaatattgaacactgaatataaatggactctattctccaattaaaaggcatagagtggctgaatgctgcctatatgctgcctacaagaaaccacttcatgtaaaaagatacaaatagactgaaagtgaagggggtggaaaaagatatttcatgcaagtggaaaccaaaagagagcaggagtagctatactgatatgagataaactacaaatcaaagactataaaaagagacaaagaaagtcactatgtaatgataaagcgctcagttcagcaagaggagatgccaattataaatatctatgcatccaacacttgagctcccaagtctcccaagtatttaaagcaaacaatagtggatctaaaaggagagatagactgaatacaatattaattaggggactttaacaccctgctctcagcaatggccagatctttcagacagaaaatcaacaaggaaacttcaaagttaaactacacactagatcaaataggcctaactggcatttacgggacatttcactaactatctaactgttacagaattcacattattttcatcagcacatagaacattcttcagaacagaccacatcttaagtcccaaaaccagtcagaataaattcaaaaaagtttatatcacatcaagcatttgttctgaccacaatggaataaaactacaataaatgaataactttctggacacatacaacctaccaagatggaagcatgaaaaggcagaaaaacccaacaaaccaacatgaaactgtaacaaaaggaaaacccaggaccgaatgacttcactgctgaattctaccaaacatttaataagaactaaaaccaattctactcaaaatgctttaaaaaattgaagaggatggaacactttcaaactcattctacaaggtcagcattatcctgataccaaaaccagacaaggacaggacaaaaacaaacaaacaaacaaacaaacaaacaaacaaaaaaacactacaggattgcttgaggccaggagtttgagatcagcctgggcaacatagtcagaaccaatctcttaaaaaaaaaaaaaaagaaaaaaattagccaggcatggtggcatgtgcctttagtcctagctactcgggaggctgaggtgagaggaccaattgagcccaggaggttgaggccgcagtgagccatgtttgtgtcactgtactccagcctggggaacagagcaagatgctctctcaaaaacaaaaagcaagctgggtgtggtggctcctgcctgtaatcacagcactttggaaggctgaggtgggagaactgcttaagcccaggagttcaagaccagtctggacaacatagggggactccatctctcaaaaacaaccaaccaaaacaaagccaaaaaagaacataggccaacatcactaacaaacatagatgtaaaagtcctcaataaaatattaacaaaccatgtttagaaacacatcaaaagagatcattcactatgattaagtgagattcatcccagggatgccagtatggctcaacatatgcaaatcaataaatgtgatccatcacattaaagagaaccaagaacaaaaaccatataatcactccagcaagtgcagaaaaggcatttaataaaagaatgggttgagggagtggagcccatagtcagagcagcagtggtctgggattttggaagtagaaagaagggcagcaccactggccaggaccaccagggaacacccccataggccctgggtgttgtgctccagggagggttccctctggagttattaatcttggtgtccactttgcccagctgcccctcacagggtcagggaggatgaagggaaagcttccttctaatgaaagttcagggactcacagttcctagagcctgtagggagaggaagatcttcgaggaagagcacctgggcattggggcgtttgagaggaagatctatgccaggtccaagtggacaacctgtggactctctctccagggacatacgggtatctgggaatctcctgtagcttaaagaggtaaagacctctccctttagcctgaggactggaggatgctggttcaggtgaatgagtcctgcaggggctggtacaggcctggagggtggtggtgtccagggccttgggttcacccttagcatgattcaggccgggcggtgtttcacatgagcaagagggcctgggttcattgcttcaggacaatggtgaaatctcatggtggaagaaatcttgtccttgccagtgcccagctttcatttggtcttggcccagagtgtcctccctagagaagactcttgtcccttcttcacactgcccttcagggatatgccagccttatgggataagatggggtggagactgtagatgtgggtgggaatctctccacagagtgctccttctctcagcggttgcaccttgtctcagggcttcagcttgaaatctgggatctccaagcccttccctccccagtcctggccaggaccacatgggcagatgcattgtgtgaagtgcatttcatttggggtgtcctctctgcatggcaccctcccgttgattctctttgcgcatgtcagagtgcaggcaccatccacacctcctgctggaggagggacggagctgttgactcctgagagctgatcatgtgttcccaccctcacacacaatcatggtccatcctctgagggacatgtgttgccaccactgtggagatggtgcaactgacagtaacaaacagtaaaatctggtactgaatgggaccttaagccaacaatgacaatgtcattccaaggtgtttcatttttattgattcaatgcaagtcacctgatttcattgactattcacaatagctcgataaagtaaatgcatcatcaccaccactttaaagaggaaaaaggtgcttgggcagtttgtgactactgtggtggctgctgcattgctctctggtaaagccaagtaggtggtgggtgcggcctctgggctgggatgatccaccctcctggtggtggcaggggagccaagctggagccatggcctgtgcagtggtagcagctgaactgaccgctgctgcaggatttgcaagctgttacattttgcgaagccatgaagcacataaaacctcaagtagaacaagtgtttcaaagtctaccaaaatctgccttcagagattattactacagaggtggatatgaacccaaaatgacaaaacgggaagcagcattaatactagataatgaatgaacactagtaatagtagggtaagccctactgccaataaagaaaaaaataagagatgctcattaacatgttatgctcttaaatcacgcagacaaaagagggtctccttatatagtagccacaatcaatgaagctaaagatttactgcaagatcaagctaaaaacagtaggtgtataatgaatttttaacttcatattagtttatgtatatgaatatcaagtttttataataaaatgcctccaaacaaagaatatttgatttagggtttaataacttctaagaggggactcagatgtttcctgtttcacagtcagtctgagagggtcatttttcctggagctgacctgggtggaggcctcacactgatactccccagcatcctctctcctgatggggtttatgctgagcatacagtggccctgggacagctccattctctccatgagtcacagacgctggtcatggaagatccactggataaggttccagagtcatctgtggggcaggtcaggatcacaacatccttttcttctgtgactctggtgttgctgactcagatggggtcggagccactgaccctgtggacaatcagtggaggtgctcaactgaaagtgggctgagggcacgtcttctcctccatccctgggtccttaaggtaactgtggaccccagaccaactgacacaggagctagaaagaaattatttaggaagttagtgagggtaagagcgtccttggcaaggtttcccctttaacaaaaagcagcccaagataattccttttctaacaaagagcagcctgaaaaattgagctacagatgtagatgagcaagatggaagcttgcacaggtgaattccagtaggtgtgccaatagaaaagggctgcctggaagccaggtatgttcaacatggagactccatcctcccttttctccattaccacatgtacagtaaaaaaccaggcaacatggcaccggccaggtagacaatccatctgcatgacaaaagatcagagtggggcagccagcaaatggcacagctggtctaaacaatctttcaccccctgtataaatcagacactgcctcctgaagctcatctataaaaccttctgcatttcactatggaagtggcaacccattttccccaggacccctctctctgtgcagagagctcttctctttctttcccctatgaaacttccactcttaacttcactctgggtgcctgcatcctagttttccatggccatgggacaatgaacctcgagtattaccccagatgaatgatgctgtttcacaatcactggttcagctcccttcttcttagggtttcacagctcggtggggagaataccacgcctcagtggtctggggagtgaggaacaaatgaagaattaatcagattttacttagaacgctatcacctgcctcaaccatcagatccatgttgggaatgtccaggcctcctctcttagatctatacccacttcactggacctgaaatcctgtgtttcccgatgtgttggtgtcactcctatgagaggataaaggagagaactttgctttctctccccactcacaccctgcacaagacagggcccaatatgagacacacactcgctcagtagttctctcatgaaggagggagggagtgacctcgagtgattctgccatctgtagtctgtgtaccctggccagtggctgtatcttcatatgcctcagtttcccctcagtaaaataggacacacaatgagaactaaaaataaaattctaattccccagtgaactgaaaggatggcctcttggccaagcggatcccagagttcctgatcatgacaggatgggaggttacacctcattacagcccctccctttggaagtttagaggtgacaactgactagcattaacgctaaaatcgagatcatgagactgacagaacagactctctgtggccataagataccaaattataaactcaacctaaggtcatgcaggcaagggctaagccacactttcctacatttaaagaataagctatgttctaacacagaattttctttctctctagcggctaaagtaacactagccttcgagataagcaatattgaaatgatcgcggctcatccaccaacactggctaactgacccctgttccaacagccacaactacacttcaattggacaggagactgatttcagtaactttctcctaataagagaccactgagcatggcctggttctgctggtatacagacacggtgcactgagtaccataatgcttgtttcatcttttgatgtataagacctaatttaatacatttaaatctgaattctccaccccaaagtgaacatggggtgcatgtagcatgcatgtttgttgatcacgcatgtgcgtgtacttcctttgtgagtatccatagctccacctataacctgttgaatatgtatacctggccaactcattcagcataaatctatcttccacattcccctcccttgaagtgcctgctattggtctctgctggaggctgcatcttctaccctggggaatggccagcctgcaggctgtaaccctgtgtaagaaataacctggttgggtgcagtggctcacacctgtaatcccagtggtttgggaggttgaagtggtagaatagtttgagctcaggagccagagactagcctgggcagcatagcaagatcctgtctcttaaaaaaattttagggaggagagtgaggatcagaaaaaatacctattggctattatgcttagtacttggatcatgaaataatctgtataccaaacccctgattacatatataacaaacctgcatgcgtatctttgaacctaagataaaagtttgttttaaaaactatctgggtgcagtggtgcatgcctatagttccagctactcgagactgaggtgtgaggagtgcttgagctcgggggattgaggctgcagtgaattatggtcccacctgtgagtagccacttcactcaaacctgggagacagagcaagaaccggtctctaaaaaaaaataaaaatagaaaaataaaatgaaaaatatatgaaataaagtctcctttccaaacgtacagatctccgatttttctgccaacaatgataaatggtcagtggcttgccatgttgtctgtgaattacttttaaaatattcacgatcacctgacctaaaggttggtaccaaggaaccgcctgaatacaccgtctctgattatttgcctccaacagagtgttccctgggcctgatctctggtggacaatgagctgctgggaacatcctctcttctctattcctcccctggggatgctgaccttcccttggagtctcctaagttccccagggcagtcggctaatgtcctagggagcttacctgtcttctccataccaagtctcatgtgaaggacgaggctttgcccttgcccagatgaggctctgggggctgagccctggctggctaccagctgcaagagccatggcccttggacagctggtaaatccttgttcccagtcagccctgcccaagatgcctcaacccagccccggcacaggcttcccagggtcacatggagtcaggatcctgggacaggggactggacaggggtttccagggctgagtttctgaacaggggcttcccaggggtcccctcactccaggatctgacatggtcctacaaggaacgtccatggggaggggacccaggagggggaactgacactgacctccccttactgagcctccccccaaccccatcagactgtccttcctctgtagcaagtgcctgcagggtctggatgcaggaaagaaattctgatctgtggaagtttgtctcccctgtgtgtgtcttgcactaaatgtccaaacccccaaatgggatgtaatgtagagggggacacaggcacagcccaggcctgaaaatcctgtgtgtgtgaagcagaactgacccccaacacccagagctcatgagacatcactgtgtacgtgaaactggccagttacttcttcattcacaagatctgtttttatgacttgtagggtgtaggatcctgtgtcattgttggtgacattctgtatcagcagacatgtattggggtatattgtctctcagcctctgtggcaggtcctggggtaattacttgagttcctagtacatatcctgtaattcccctttgtaccagttgtagccaagcctaaggcagattgtgggtgagtggaagaatctccttgccttctgcagcttcaacagtgacttgggcagtggtaggcaagttccagaaagttaaaagtgaggctaggagtggggagagagcatcagttaatactgggccctatgcattgaggtggaaagatggggccctaggtcctggacaggtctcttcatccctcagccttggagtgtgtgtgtgtgtgtgtgtgtgtgtgtgtgtgtgtgtgtgcgcgcgcgcgcgtgcgtgcgtgtcctactgggccaaggtcagcagcatgacctcccttccttcagtgcctctgaccttggcatttccctgtttggagtccttttccccaggggtctgcctggctccctccctactgccttcaggtcctgctcacattagggcatccttgggagaccccttccctgacacctctagagaccctgggtcttccctttctgacctttcgctgctgtgttccctccagggctcttgtcaatacttgacctcacattctagatacccttgcatgtctgtcttcctccctatgagagcatgagctctgtgagaacagggacttgtgtgatcttggttgcaccccagtgcctgggacaggctgcggactcctgtggatgagctcatgagtgttcccagggcccttcacaacgtgggatttattttccaatggctgaggttgttggctaagagctctgttggagttcaatcaggctggtgggaaaaatattagagatagttatagagatagacacaaatcttcttggaagaccaaaaagtttgcataactttggtaatagatctgactgaaggtggtccctttacctttagttaaacaaattaaagtagtaacaaaggaaggcagagtagtttgtctagccagcttgtttactcatgtgatcttaagactaaccattgatgtgccacaggtgcttaattgctttctacttgggaagtccacaatgtcaattaccctctaacggtgttgactcaagcctttgttaattaatcttactgaataaatatgagtctcactagctgatcaaggccatggtcacaactgtttataggactcagcagggagtctgtaagcggccctgacagactcagctggactggcaaagcaaaatatgtgtgtgtcagtgtacactattcacccgtcccccacagctggtgcccctatatgaggagtgctgccacagagctctgtttagtgtcccttgttttttttcttgagtattaccccaacttaaattgtgattattgtcatctgttttcaacattaactgctcagtgatgattcacttggaaaacattaacaatcgagattgtttcttcactaacaacctcagattatttagattttcctgttgtaatcccttcttcctgtttagtgtccaacagaagccctctgtccctctcaggtccccgttctctccaagaaaccccagccagtctctgtgctccctcctcccatccactcccagggagccctcccctcacctgtgagcagaagcgcctgccagggatgtgcactctgtgaggaggggctgagggaggccccatgggctctgctgtctgctttgtcctcctctgtggagaggagcttgggcttcagaaaataaggaggccagaaagtaaggaacaggctgagaaataatggggatgtgtcgaaaggtcacagatgccaacatctttgtcctatgcaatattatccataaaattacaggtttgagatatgcttaaattttcttctaacatgcattaaaataaacatataacttttaatagttatattaaattgtatttaatataaattaaatgctcttgtcagagctactgtgactgtcagctctgctgtccttcctctctctgtgctaagcctcctcccagggcagaagcacttcccagggccaggggtgggggcggggaaaggtaagtggcaatgaggatctgcacaggtagcctttccgcctcctcccctctcagtcctgcctccttgtcttcttttcctctttttctccaatctacatttcagttccttagaccacgctgtgagaagcaaggcttattgggacccccatcccttaacaggatgacctgtgctccccataagtgacctctgctgtgtctagggattggctctgtcagcacctcacagagagtccctggggcccccaaactcagtgttattttctctatgacacagaaacccctctgggtatgcaaggttttcctcatgttttctaatgtctgggaaggttggatttactcccagcagggaggtcacagagatgtccagggagtggggtcctagaaatggacaaatctagagctaaagcccaggtctacgattttcagttgtttttttctgcagtgctatgtgaccctaatttcctaggagtaactaaaatgcaaacctcagacatttgtagacattttatgatttttctctacagcttgtaccactgttattattatttgctttatgctttttcctaaataaatttactttacaaaacatccttgtcctagtagggtgcaggggctcacgtctgtgatctcagctgcttgagaggttgaggtgggtggattgcttgaggacgggaatttgagacaaaacatctttgtcctatgcaatattatccataaaattacaggtttgagatatgcttaaattttcttctaacatgtattaaaataaacatataacttttaatcatcatattaaattgtatttaatataaatttatatacaatacatttttatataataaattatatatataaatgtatatataatagtttttcttttttgagatggagtctggctctgtctcccaggctggagtgcagtggcacgatctcagctcactgcagcctccgccttctgggttcaaacgattctcctacctcagcctcccgagtagctgggattacaggcgcctgccgccacgcccagctaatttttgtacttttttagtagagatggggtttcgccatgttggccaggctggtctcaaacacctgacttcaggtgatatgccgcctcggcctcccaaagtgctgggattacaggcatgagccaccatgcctggcctatatattttatataattatataaagttttctataataaattttatataataatatataaaatggatatttatttaagataaagttattagttttatatatttacatatatttaggaataaatgtgttactgtgggagcccagtgcccaggcaggtagtcagtacatgatggttgtcattagggttaatactttggaattctggattttttcccaagagagtgtctacgctggaatattgggcttgtggctttctgctgatgtgcatgtgtgaagaagctacttccacttattaggacttgtgtatctgtctcgcagtttcactacctattttctcgtgatgttggtcaagtcgcctaacttttctgtgcctcatttacctaatttgtagaatatgggtaacagtacacaagtgtgagtgtgtatttcccaggactgaccactagagggcgtgaaggcaccggcacttactattacagcaatgggtgtagtagtgctcatggtcgtaaacatcattctcccatgaaaggaaccagggcttcctgggagaaataactgattccagggctggggccggaaagcacaagcggagcctggagcatctcgtgaggccagaaagtaaggagccggctgaaaaataatggagatctgtcgaaaggtcacagatgccaaccagaaggagctttgaatgaccaattttgagacaaaatgagcactataagaaataatgatagtaataaattccaacccataaatacccatgagttcctactaatataaataaataattgaatacataaatatataaggatgaagaaacagctttttcttacagcagaattccaattaatgaatgtagaaggaatgatcaaatagaaaatcactatttggctaacagcacagtcaattgtttgtaggcaagaattatcaatggactttaaatatgaatgggtaaaagtatgatgatgctacaactagtgagtaccaagggggaaaaaaaagtacgttgagaagaaacaggctacttccatattcccaaagtatcacttcaggagctacttattgattataatgggacaaatagtaacttacagtagagaaacctggcaacagagtctctccgaggtacaaaggctctcttcaggaaggaggtaaggggaaggaagaagaaaacactgtcctgcctcaattatttgctttccccattctcaagtgtacttcatagacattcaaagatatgtgttgatagtgtccacgatccacatggctctattatagtcatttattcacacatacattcagtgaggctttgagtgcctaatgtgtgcctgatatttgctagatggtggatgctgagaagatcaggtgtgctgctgtctctagggtgactgaatccacctgccccactttacagatgtggaaattaaagtgaaaaggatttataggattagttcactgtcacaaggtcactagccttaaagttacaggagtaaagcaagtttcctgacttgctagattttctgctgcaggtgctgacaatggtgagctccaataggagagaggacactcagagtgaagtgggagccctgaacaccctggattagccaagaggacatgccgggtccagctgtgaccgcacaaaggaccattggggatatttgtattctctttttcacttagagcttgaaatgaggaaaactaagtgcagaaaaccaagagtggaagatttttcacaaagcactggtaacatgcatcagaaaaccctgtgctgatgtctgtcacggtgtttctcactgaacggtaatagtctggctttgagtgtgttccctctacagcctggagttctgcgaggcagggaccaggtgtgattcatctttgtctctccagtgacagtacacagcaggctctgataaatatttcttacaaaataaaatggaataaaaagtagacatctgcacaggtgtgggatgactgagcagcagcagaagcaggaaaagtcagcgtccccagatcagctgatgtggtgttcggattctagataggggtgaggtgccaggatggggatgggggtcctgtggctctgctgccctgggggacacccctaggtttcacagtgcctgctgtggttgctgcactttgcttccccatgggaaagtgatcagagggtgtggggcttcaggtgaccccatgtgggaaatggccaagggaaggtggggtgggcggcacatggttttttttaaccaatatttgaaggtaggttgtatgaaaaggtgttaggcttatttcagcttatggggagtaggacagggattggtgagtgtgtatcaggtatattttggctcaggatggaaaagaactgtcacagtaacataaggtcttttgggaaattacatgtttactggcagagttcaggccagggctgggtgtctgaaaatacctgtcagggtcacttttatggttacaagggcagagcttggcttggaaccaggtttcttactaataccacatattaagtattataaaaactgtcctttgcaataggacattgctctatgatgcaggttgaggtccctctgtttaagtaattgtgggtggctgtgattctctcatctagtctgcgacttggacttcacctccatctgcagtccctctcctttgctgttgacactggtcagagttaagcgcatttactgacgatggtcacagggtggcagcactgcctctctggtattttctaaaacctcttcctggaactgagccagtctaagaggatgtcatgactaagaaaagggcactaatgaggtgaacagataattttttttttcttgtttctcctgtgaagtaacagagtggaggtgagcatggaataattgccttttagaaatggaagacaatggagagaagtgtttcgcaaaccttaatgtgttcacagatcccacacagatctttttattcaatacagattctgatttttctggtgaggcctgagattgtgcatgtctaaggagcttttggatgatgccattgctgctggttggcggaccacactttgagtagcaaggctcgaagatcatttagaggttaattctcactgcatctaatttatggatgaaaacaaaccaaggtccagagagagcatatacagcttgcctaacaaagccattccctaagtgcctgacttcttgcatttaaacccagggcttcagcctttgtccagttctcactccacacatcacacggtttgttcactgttgtgaacgacagttgtggcagcatctctttagtttaggaatccagagccccaatttcactaccctctttggtcttggctcatgctgtgacttcgaatagttttgcccttacttaaaatcttcagtggctcttttgtaatcacaagatcaagttcgaatatctctgtctagtgttcatggctttataacatatggtatctctttagtaaccttacctaacttccctgttttaaaattgtctcttgctgccatagccctccttgctccttcctgctccctaacaaactgtgttcacttctctctcagtggtagtgatgatggcatggcctctgatgttagactcatgtaacttctaatcccagatccaccaccaacattggcaagttgattcatctttctgaggataagcatcctcctctgaaataaacttagatggcggttgagaggggtaaataaaataacacacaaacccactctcatccctgagaccctcttcaaaactagcatataaaaatagctatttgaagaggttcagtgaaattcaaggtaacacagagaaggaattcagaatcctatcagataaatttaatagactgaaataatttttaaaaatcaggcagaaattctgtagctgaaaaattcaattgacaaaccgaagaatgcactaaatctttcaacagcagaattgatcaagcagaagaaagaatttgtgagcttgaagagataatatatgaaaactcagagtcagagagacaaaagaaaaaagaattaaaagaataatgcatgcctacaaggtttgattattaagctactcaaagagatacaagagaagggtgaaaaccaacataaagaaatgtaaaaaacaatcagaatataaatgaaaaattttctaaaatgctagctagtttttttttgagacaggctcttactctcatcacccatgctggagtgaagtggcacagtcatggctcactgcaggctcaacttcctgggctcagatgattctcccacattagccttccaagtagctaggactaaaggcgtgtgccaccaggccaggctaattttttgtatttttagtagagatggggttttgccatcttacccagggctggtcttgaactcctgggctcaagtgatccaggagattcactgccaaaaaggatataaccaagtcatatagtcataggttatctaaagtcaatgtgaaggcaagaattctaagagcagtgagacaaaagcatcaattaacttataaaggaaaacctatcagtctaacaccagatttctcatcagaaaccttacaaaccagaaggtattggggtcctaatcttttggcttcttaaacagaatagctctcagccaagaatcttgtgtagagtgaaattatatttcaaaatgaaagagagaaatacagtctttttcaggcaagcaaatgcttcaggatttgtcacggctagaccatcctacatggaatgttaaagggacttctaaatcacaaaacaaaagatttaaatagaacagaatagaacctcttgaaaccaaaaaattcaaatggcctataaaacaataacacaataagaaaacaaagtagataacgatcaacatgatgactggaacaaatattaacattgaatgtaaatgacctaacactccacttaaaagacacagattggcaagataaataaaaaatcacaaaccaaatatcagctgtcttcaagagactcacttaacatgtaaggattcttatagactcaaggtaaagagatgataaaagatattccatgcaaatggaaaccataagtgagaaggaatagctatccttatatcatataaaacagactttaagcaacaacagtaagaaaaagacaaataaggcaactatataatgataaaaggatcaatcaaacaagaagatattacaatcctaaatatatatgcacctaactttggagctcccacattcataaaacggttatgatgagacctaagaaaaaagatcaacacaaaacagtgagggtgtcctgggttttctttttattggacagcagtgtactagcctatcactttcccagtcaggggatttttggtctccccattcccctaccatgggttcatgccaaagtccatattttttattagtgtttggaattggattttttttttttgaggtggagtctcgctctgttgcctaggctggagtgtagtggcacgatctcggctcactaacctctgcctcctgggttcaagcaattcttctgcctcagcctcctgagtacctgggactacaggtgcatgccaccacacccagctaatttttgtatttttagtagaaacgagatttcaccatattgtccaggcttgtatagaactcctgacctcatgtgacagggaaacaggcactcagtgaacttcatgcgattgaggagttaatgataatgagagaagggctgtgaggggacagcactggggacaccagagcctgtgacgggctgagttgctgtgccttgggagatgcccttttgactgagccctgggaaggagggggtgtgggggcaggagctgcctgcagagggagtggcctcaggtgggcggccacctggctgcagggaagaggtgacagagttcgtgtgcagagcttggagggtgaggaggaggtgggttgaggtgaccttggtgagggtgaaccatggggggctgtgggccctgctgagggaggccagccagccctggacctacagggtggtttggtcttttttgtcccattcccagcatccactgagtggtgaaactctgcaggccagggaccatcccactggccagaaggagcgcacagtaggtgcccactcagtgcatgttgggctggacagaacctcactctgccccctgcccccagctttgggagctgcagcaaggtccctccccctagggatctccatgcctctgtctctgaggggtgagatggggagacttcaaagggccatctcagagtgtgggggatagagacgcagaagtgtgggggatagagggaggcctgggctctagacccaaaggaccttacacacctcctgagtcttttcaaatggtttcttctgttactttaaaaatgatgtaagtcatcatatttattgtaaatcccaggaatctaatcatgcgtaaaataaggtgtcttatccttgaccccaccccttccccaattaaatttccaggatgttaccactgtttgcagttggtgtgaatctctctttaataatactctgtttatctcacttgtcgttttacgccaaaatacccattgaattatattattgctgaagaccattcttttttttttttttttttttgagatggattcttgctctgttgcccaggctggagtgcaatggtgtgatctcggctcactgcaacctctgcctcctgggttcaagtgattctcctgcctcagcctcctgagtttctgggattacaggtgcacaccaccacacctggctaatttttgtatttttagtaaagacagggtttcaccatgttggtcaggctggtctcgaactcctgacctcatgatccaccctccttggcctcccaaaatgctgggattacaggcatgagccaccacacctgcccagaccattctgttctactgaatcatgtgtggtgggcacctcttatatcaatacatatggattttatcttgtgtttgttattggctcccctttttctcattgcatggctacactcaatgctttgtccacacccctgttcctgggttggaatcttgtgacagaaaatgaagtaacaaaggctaaagctttctaaagtggagtcaggagattgcaagacaattgcactttcaccagcaagagctcaaaccacagaatgttccaatagatttggataaacagctgaagtcagtattcaccagccttcaacatctcaactaggagaaccctaaaattaactaagcacatagaatggaatggacttgtgatttaggattccttctcagccaatgagctgcttctgaaaacaactttttgtggaaattacctgtaaagaaaaccctctcctgtgcttgtcttacagaacactagtcagggctgccctgattcagtggacccgaattgctattatttgtttcctaaacatatggtattttctgtgaccttcatctcaatcttttttttaagttactgggctgtttcccagttttcataatgacgagacattctgcagtgtttcatacacatgtcttttccccatgtggagtattgatccaggagctcattcagtcaacgcatgtttatgaagcatcctgtgccaggctgtgggctggtcactgtcttcagcagagagaggacaggcacagtcttgccttcacagagctcacagctcagggaggctcttagaagtgggatactggtcggagcatgtgcacattaaacatgatgaggtcaaggttgctatagggactaaaccacagtcccaccaagatcgcattgagttcctgtggtagaccagaggtcagggcccctaagatgtcctgagcagctccctctgctcagaagttttggttccacaggtgacacacctgagcacaggtgacccctgcagaacctgtgattaccacccaaagccaagagtgagtggtgggtgttctaggaggaaccgtcacctccatgggcagggttggggaagactgaggggagcaggtggctgatgactttggccagaaggtagggggatgggcaggtgtgcgctcatagggaagggaagagaagggagggcattgcaggcaacaacacaaaggttggaacctgccttcatggactgagaaaagcagggagtccacccaggctgcagctggggagggaagacatggggagcagtgggtctaggggagaagcagactgcgattgaccttggggactgggcagtgagcagaggtgtgttatgtgtgtctgtccccatcatagatatgaggaggggtgaggccgcgggtggcacctgggtcggtgggatttcatagtgcctgctgttccctagagcctctctgtatagagggtcagaatagatctgaggctgtggtctgggggaaggggctggtggtgcttaccatctctaggggtgggaggagagggatgaggatgcccctgagcagtgaagcctcaaggtgtgtggagccacagttgtctctcattagacatgtgttttgcgtgaggatgccagggcctggtggttattactgttgtcaagtttgcatgacaaggacccaggtatccagggatccagagcacagggcccctggtgaggggatgaggctcagatggggctgaccaggttcatgtggtcagagtgggagggactgatggagagacagagcctcaacccctcctgtcaggagctgtggctatgtccaggagagatgacaaggatgacccaggacattgagtgagtcattgagacattgaaggtgaggacagggcagagaggaccctggtgactgctgaaatgtaggatgtgaggagggctctgacccatgcaagttacaggacctccccacccccgagcccacagatgacccttaaattgggcatcctgagtgctgtgtgtgcccagcagggacactggataggctggacctgagtctctgtaagggcagcgctggtctgtaggaccagagtcttctctgtgggtgtgacgtgggcaggaattagcaagatgggggtgacaaggcttggcttggaggatctggtacagaagcccatgggcttggtcagctcagcttctcaggggctcagctggggctggaggagcaggatgctgtgctcagggcatgctccaggcagcgtgatgtgtgtggttccagggtcaggcacgggggtcaaaaattaaccatgaaaagttcccaccttctgtaggcagagaaaatggcctgattgtcagggtcagggagacttaccatgtggccaaagcaggctctcagcctcccagagaccacaccctgggtgcagcactcagctctgcagggtatggcaatagatgtgccaagaaccccaacatccagatgcatgcaaaaattttgcgatatataaaatagagcagatcaagtttccctgcaataacgttgttcctggttgtgtctttttcttgtaaactagacatggacatctttccagcagtctgttctcatctgccaccttcctgctgcagcacctcagaatgaacattcctgagacactgtccgtggtgctgacgaccaagagctatggaacagagtgtgatgtagaatcttctagttacctctgctctcctttcacttttaacaacagagcatcattaacaatgagaaggtggagaggtgttcaggatcttgaagtgacttctgtcttgctctcccataaccctgaagctgctgtagacattattgcagaaactgacaccacagtcaggatggccttgtccaggagcccatgtgcagtttgtagtgagcaaggatgagaaaatggtcttgaaaggggtgatggacagaacaggggcttttcaaaaatgtcacatcatcacccccagcatccgtgaatctgtcacatggtaagagaccttacagattaaatgaaggattatgagtttggaagattattgtagtttatccagatgggtccaacataatcacagaatcccttccttacaaatgagagagggaggtgggagagtcagagaaggaggaggagatgtggggatagatgcagaagacagagcggtgtcaagatgctgcactgctggctttgaagatggagaaagaggacacagccaaggatgcaggaggcctctaggaggtggaaaaggagaggaaacgcactctgccctggagcctccagaaagaacgcagccatgtgggcaccttggttcaagtttctgtgtcacttagcttgtgggaatttgtcacagcctcaacaggaacctacagaggagtcaccttgtgtgcaggtgggatccagggtcatttacagctaaatcctgatgtaaatattgcaggttgcttttcctacttcctatctcatggccaacaaccctggacaatggcagaacacccttggaaaccacggctctgtgctttagtggagggaccagcttgtttgtgggaaggtagcacctggtccaagtgaacctacatgagatcgttactctccccagggccctcagggaagggctgagaacagctggcccaggtgtgtggaggagctgcaggtgaggcagggctggaggggcctgtgggtccaggtagaggggcagacaggttgtcccatcgccatgggagcctgcacgagctttaggttggggaaccctgctcctctgacctggacgctcctgtgtggagaggaggcttgctcagtgagatccacgccagggggtaaattgggaactgatgggaaatgaggggctagagtcctgggtagtgcctgggaggaccttgctcaaggactgaattcttggtctgttcccaccttggttactctgacaacccctctctgtgtcccacggggataaagatctcctgagcagtggccattgggacagaggagaacctggtggccagagctaagcatccaggatcctggatttggggacaggcaagctcattgctgggggacagtgatagatacggcctccagggcctgggtgaagagagcaggagggctcaggacactggaggctgtgtggaggtcacacccacgatctgtaccacccatggatgctcctgcattgctcacctttgtgtggacatcagatggccccaacttttgcactcctgagacatctcatgcattcacagagggacccaggctggggctgtgcatggccttggtctctagggtagtgtgaggacagctgagcactcagctggctgggcaggactcctgcgaatcctgccctttcctgtgtagggtccaccccagcctgactcctaaccccctactcctgtctttccagggaagagagactggggttgagataaggtggagatatttttcctgtgtgacccaggagagaatggacatggagtttcaggtgagtttctgctaagttcccatgagcagaaaaagagccaatgagaggaagtttcccctttattcagatcctttccaggtgaccccgggtgggccataggcccattcactttccctgcaagcccccgcttcctgtggtgatgggaagccttcgccttggcccacccagagcccggggcagtctgttgaggtctctatatattcagcagggacccccatcccttcctgtccccaggcctgtgtctcctcaggactcagagctggttctctggctcaggctccatgtccttccccatccccagggctgggggcttcagggacgctccatcaacccacaggagcagctcccagaggaacctaagaagccacatctgctttgtggtcgatccagcagtaaatgtttgtgtcagagtgtagcaattccagtaaaaacagagaagaggtcttgacccctgaggccttctcagaacagggtctggcatctctctctgggcccacccagggctactctgggactgaacctggctgtgctcagggggttcctgctcccaggcccctccctcctctgctcaccacctcctgttattttcactgcagtttcctgaacttcagctcagccagatgccagtggggacagatcctgggtctccctggggcccaagggaccagaatatctgtggcccccactcacctcatagatgagagcagctgccctggtgctgggtaggggaatctgggcaggggagagaggggtgtcaggggacagggaaggattcctgctgtgtaggaattccagggctctcctcaggtgatggagggtcccagggtggggttagcacagggagtggatgatcctggccctgaacagaggcccagctcatggccagggcaggtctaaccttatccaagtcattctgggtagggtgggtttgtgctggggattgacagtccccctgccctgagcctgcacagctggggccccagtggaaatgggattgggaacggacagtcttacctaggagatggagctgtcagagggtccatggcctggggacagagacaaaagtgagcacgagagtgttaggatagctgggcccctcctgcaagagtgtgtgggggtcctcagttcttagagaattggggagagggagcctttctcaggttattttaggggtcaagtaagcaagtgaggttgaggaagtgacccatgacccagagcccggaggttagggctgacccggccagttggggtttcctgtgtgatgttttatgggatcctctttgcagccccagggatagggtcagaggcccctgggtgtaactggcaggagtggacaacttggggctggcttagtagttcccagccacacccagactgaagggacactcaccgggggtggaggctgggggctgctgctccctgaagtcactctgatcgctggccctaggaaaggtcagggttatttgtgaaggtgcaaggttaaaagtcacaaattggagttaaaataggggaccaggaaaggagcctatttccaagaggggtatggagacctcctttctttatggagttctgtggtaggaggggcccaggtgaggggagttgaggaaaggccttacaaagccacatctgtcctggccagaggggaaggactctcaggcagatgctgggccaggagaacattgatccagtgacacaggaaagggactgaggacccagggaaggaatcagaccaccaggggttgcctgagaggaagggtcaaggcaccagggggaaagcagggccaggcacatgtgcaggacactgaggggactgcatgcatcttggattctcctggaactcagtgtccctgctgtgaccagacactccactcagggctggagatgctgaaatgggacaatgatcttgtcttctgtctctgccctttggcaagagacataaacgacattccaggatatgccatattggggccccggttctcccttctcacagctcagtgtctgcagttaccatgtcagtcaaaggggtgctgaccccacccagcccgtccaggctgttccagtctccactatgtgataatgcccaggatcccccctcagatgccctctcactgggtggatggattcagtgaacagggggaggtaccaggtattgagcaccgctcccccctgctccaggcagctgtggctttgctgtgctaggaaactaggaccatgctcaggggcatggccttaattggactgaattcactgaggacaaagctgttgaggaagcagcccagggtcagcagctggtgaggaaggtgccatggaatgagagggaaggatccctggggagtcgggaggctggggagagcctggcactgaatacaagacagggtctccttccttctcgcctggggtcagcgtgaaggatgggagcagaatggggaaaagctgtggtacctgccagtttttcggaggagcaggaaacacacaagtgcagccaccagaagactcccaaccaggaccccgatcaggatgcctagagtgttgtcatctgctgaaagaagaaggcaaaggggatgaggtccaaatctgttccagggggaaccatgaggggccttgcagggcaggggcatggtcagggaggaaggaaatgccatggagcctgagtgtggtctgttgtgctgtcctcatagctggctcccttgctctccgtggttgcaccattttctgtgtcttaggcttgaattactgggatgcatcaactcctacattctcccacaggaagcctgcacctcatcctgctcctgtgttttttagtccctccttcctctcacatcactcctcttccccctgtttctttttttccatcccatggcagtcgtaaagggcaggcccttgctgccaactcaatgctgatgagcagggatgatgttcattgactgttttcaggggccttccacatggaaggcacagtgggaatcaatctacctgcagcttttctcaccctcccattgccttgagggagaagggtatgtgatattgtgaaatacgtatttggtgttcatcaccattgatatggttaggctctgtatccccacccaaatctcaccttgaattgtaataatccccatgtgttatgggagggaccttgtgggaggtaattgaatcatgagggtgggttttttccatcctgttcttgtgatagtgaataagtctcaggagatcagatggtttcataaagggaagcttccctacacatgtcctcttgcctgctgccatgtaagacatgcctttcaccttccatcatgattgtgagacctctccagccatgtggaattgtgaatcaattaaacctctttcttcatacattaccaagtctcaggtatgtcttcattagcagtgtgagaatggactaatacagtaaattggtaccagctagtggagtgctgctataaagatacctgaaaatgtggaagtgactttggaactgggtaacaggcagaggttggaacagtttggagggctcagaagaagacacaggaaaaaagtttgaaacttcctagagacttgttgaatggttttgattaaaacgctgatagtgatatggacaataaagtccaagctgaggtggtctcagacagagatgaggaacttcttgggaactggaacaaaggtgactcttgttatactctagaaaagagattggtggtattttgcccctgccctagagatctgcagaactttgaacttgagggaaatgatttagggcaactggtggaaaaaaaattctaagcagcaaagtgttcaagatgtgacttgggtactgttaaaaacactcagttttatgtatttacaaaggtatggtttggaattggaacttatgtttaaaagggaagcagagcataaaagtttggaaaatttgcagcctgatgatgcaatagaaaagaaaaatccattttctgaggagaaattcaagccagctgcagaaatgtgcataaacaatgaagagcaaaatgttaatccccaagacaatggcaaaaatgtctccagggcatgtcagagaccttcctggaagccccttccatcacaggactggaggcctaggaggaaaaaatgtttcctgggccaggcccagggctcccctgctgtgtgcggcctagagacttggtgccctgcatcccagccactccagccatggctaaagagggccaaggtacagctggggccatggcttcagagggtgcaagccccaaaccttggcagcttccatgtggtgttgagcctgcaggtgcacagaagtcaaggattgaggtttgggaaccttcgcctagatttcagaggatgtatgaaaatgcttggatgtccaggtgaaagtttgctgcagaagcagagccctcatggagaacctctgctagggaagtgttgaagggaaatgtggggttggaaccccgacacagagtccctactggggcactgcctaatggagctgtgagaagaagaccacaatcctccagaccccagaatggtagatccactaacagcttgcaccatgcacctagaaaagctgcagacactcaacgccagcctatgaaagcagccaggagtggggctgtaccctgcaaagccacaggggtggagcccaaggctatgggagttcagctcttgcatcagtgtgacctggatgtgagacatggatacaaaggagatcatttcagagcattaagatttggctgccctgctggattttgggcttgcatggggcctgtagcccctttgttttggccagtttctcccatttggaatgggtgtatttacccagtgcctgtacacccattatatctaggaagtaactaagcttgcttttgattttacaggcttataggtggaagggacttgccttgtctcagatgaaactttggacttggacttttgggttaatgctggaatgagttaagactttggggaactgttggaaggcatgattagttttgaaatgtgaggacatgagatttgggaggggtcgggtggaatgacatggtttggctcttcttcacccaaatatcaccttgaattttaataatccccacgtgttgggggaaggacccagtgggaggtaactgaatcatgggggtggattcttcccatgctgttctcatgatagtgaataagtctcacaagatctgatggttttagaaaggggagttcctctacacatgccctcttgcctgccgccatgtaagacatgccttttgccttctgccatgatttcaaggcctccccagctatgtggaactgtaagtcaattaaacctcatttttaaaaaaattacccagtctcaggtatgtctttatcagcagccaagaccagctcggtcgcggagatcctaacccagcagtgctagaggaattaaagacacacatagaaatatagaggtgtgaagtgggaaatcagggttctcacaggcttcagagctgagagccccaaacagagatttacccacatatttaataacagcaaaccagtcattagcattgtttctatagatattaaattaactaaaagtatcccttatgggaaaccaagggatgggccgaattaaaggaataggttgggctagttaactgcaacaggaacacgcccttaagatgcagattgctcatgctattgtttgtggcttaagaacgcctttaagcggttttccaccctgggtgggacaggtattccttgccctcattcctgtaaacccataaccttccagcttgggcattagggccattatgaacatgttacagtgctgcagagattttgtttatgaccagttttggggccagtttatggccagattttggggggcttgctcccaacagactaatacacccattttctggtatgtgactctaaagtccttagaatcttcaaagtgatgtctttttcaagctaataattgactgatgactggcagcccctaggcaacttcagaatgaggctggtcactgacccaggtaggattagagggttgggactttcagcctcacccctaatccctggggagggacctggagtttgaattaatcaccaatgaccaatgaatcaattaatggccaatgattgaatcaattaatggccaatgattaaatcaatcatatctatgtcatgaaccccaaaaggactgggtttgaagagctgaacccatggaagtttctggagtgtggtgcatctggggagggcatggaagctccacaccccttcccacatgccatgctctgtgcatctcttcatctgcatcctttgtaaagtcctttattacaaaccggtaagcctaagtatgtgtttccctgagtcctgagagctgtttgagcaaactaatccaacccaaacagggagtcatggaaacctcaatgtgaagccagtcataagaagctctggaggcccagacttgtgactggtgggaaggtggtggcaattttgtgggactgagccctctgctgatatgtccaggtagatagtgtcaggatggaattggaggacacctagctgatgtacggtgcagaactgattggctgctgggtgtgtgggagaaacccccccgcatcacatttggtcacagaagtgtgtctgtgttgatgattgttattgtggagtgagagcagaggaaaaacacagtttgagtttttccaaacagggtggaatcccatctgccaatttagaatctgaaacttatagtttcagtacttcaattaagattgaagtacttcaattcagtacttcaattaagattcagtacttcaattaagattcagtacttcaattaagattacagaactggtaagtgaaagtgatacaacaaaaatgtaaccaaagtctgctcaacttaacagctaataacaacaaagttcataaaaataataccagtcgatattgatagcactgattgagccctggctctgtgcatgaccttgttaagggctttaatcgcattaatctctgaataaatatcctcacaaccaccctgagatccaggtgtttgtaacaattctacagatgaggaaactgaggcccaggaggttgagtgtcttgcccaaggtcaaatacctggtacctattgtaaccaggatgataactggatgagtctaatccctgagttcttacccacattgctccccaggctctgaaggaatctcatccttctcattccgtgtatcattttacaccccccctccctcctaggaaaatatacaaggaaaggagtgagaggggccgagggtcactcacattttacagtcagcttgagggggtcgctcctgttggagctgactgggttggagacctcacactgatactccccagcgtcctcctgcctgatggggtctatggtgagcatatggttaaaccaggacagcttcatcctcttcgtgacctgcagacgctggttgttgaaaatccactggaaagaggttccagtgttatttgtgtggcaggtcaggaccacggagcccttctctgtgactgtggtgctgctggcttggatggagggctgagccactgactctgtggatagagtgaccaacagaaagtgtcttggggccatgctgcatcctcagagatctcagagtcaaatttagaacattctcctgtgaataaaggagaaagatgaaggacagggaggagcagagagaaccagagacacccatagcagcgagcagtagggactacagtgacctcagagaccccagggaccaggaggacccagctgcctcagaccaggaccagggagccctgaaaaccctcccacagatgagcggccccagagtcacatgagatgcaatacctggggtggctttaggagcaggcagtcagagaaatggaacatgggtctcagcccctaagggacaaggaagaggtgtggccagctcctcctaggatcctacatccaggacccagtctgtaaagaggttatgattattcctttcttttttcattaattccctccctccttcatcagagaactactgagtgtgtgtctcagttgggccttgtgcaggtacagggtgtagtgggaagagaaagctgagtcctttccttcatcctcccatgggagtgacatcaacaaatcaagaaattcatgatttcacgtccagtgagggaagaaatgtggatctgatgggagaggcttggacaatcctggcattgagtctgatagttgagacaggtgatttcgttctaagtaaaaactgactaattctccatttgcccgtcattcctcagaccagaatctccctctctgagctgaggatgcccaagaagaaaggagctgaaccaacatctggtcctggggtccacagatgccccacggtggtggccacgaccagattctgggctgcagacacacggtggtgtgacgttgagcactgacagcctgtgtgatgctgatgcaatttctctttaataaaatggggtaaatgtcaatggtccctggcttgccatcctctctgtaaattaacattaaaatatttacaattacctgacctaaagcttggcacagaatagctccaaataaacatcatctattattattttactccaaaaaaaaaaaaaaaagagttctctgggcctgattcctggtggagaaggagcggtccagagtgtcttttctctgctttccctcctcctgaggacagtgcacttcccgggacatcttttaagtttcccatccagtttaatggcctgggaagtttgtttgtctgtcctctccactctgactctcaggtgaaagatgaggctctgcccttgcccagatggggctctgggggctgagccctgcctggtgaccagctctaggaaccacggccctgggacagctggtaaatcgttgctcacaatcagccctgcccaggaagccacaacccagccctggcacaggctccccagggtcatctggagtcaggatcttgggacaggggcctggggcaggggcttgaagggctgagcttctctcagaggatcctcaggccaggccctgactgagtcctataagatctttctcaggtcatgtctatgaggaggaggccaagcggggttggactgagactgattttcccccgctgcatctcccgcatcagactatccttcttgctgtagggaatttccacggagtccggataagggaaaggaattctgatctgttatagtttgtctcccctgggtgtgtcctgcactaaatgcccaaaccccaacatgggacgtaatgcagagggggatgcaggcacagcccaggcctgacaatcctgcgtatgtgaagcagaactgacccccaacacccagaggcacggaggaatcactcaccgtatacacggagatggtgagatgcctgttcaatctgagaatttctgtatgtgacttgtagggtgtagtatcccgtgtcctctagggtgacgttctggaaatgcagatctccactgggtgatattgtctctcgaccgctgtatgcaggccctggagtcctaacgtgagtgtctattacatatgctgcgattagctggttgggctccaccgttttccctttgtaccagccatagctgtaaagattctcgggcagataaaccacagagagatgaacattctccccttcagcaacttcaaagggcgctgatgcaataaagagccaggcagtggtgggtgcgttccagaaagttaaaagtgaggctaggaaagggagagaatatcagtcaatatttgacctatgcattggcatggaaagacggggtcctgggtgcaggtctcttcacccctcagccttagagggtgtgtgtgtgtgtgtgtgtcctactgggtcaaagtcagcagcatgaccctcattccttcagtacctctgaccttggcatttccttgtgtgaaccctctttcccaggggtctgcatggttccctccccactgccttcagttcctactcacacaagggaatccctgggagacttctttcgtgaagcctcctctagagaccctgggtcttccctttctgacctttcccagctctgttccctccagggctcttgtcagcacctgacctcacattctagatctctttgggtgtctgtcttcccccccatgagattgtgagctctgtgagggcatggacttgagtgatgttagttgcaccccagtgcctgggacaggctgcagactcctgtggatgagttcatgagcgttcccagggccttccatatcctggggtttatttgctaatgtctgaggttggcagatgaagacagagtttcatgccctggtggtgtttttatttaaattgtcactgtgatatagttttactatcattttcaaaatgtagtggccactgacaatgaacttgaaaacatggaccaactgagattgttttgccccttggcaattccagttcacttagattttttggttctccttagacgctctctcccctgagtctctaacaaaagccctctgtctcctctcagagccccatcctccccaggagaccccagccagtctctgtgctccctcctcccacccactcccagggagtcctcccctcacctgtgagcaagagcccctgccaggggatgcattctctgtggggacaagctgaggggggccccatggtctctgctgcctgctctgtcctcctctgtggagaggagcttgggctccaggaacgctctagacagggttactgtgactgttgtctctgctgtccttccttcctctatgctgagcttcctctcaggcaggagcacttcccgtttatgggcaagggcggggctctgcctacaatgtctctctgtcccctcccctctcagtcctgcctcccttgtccctcctttctccttcctttttgcctatatttggttccctaggcaaaactttgagaagcaacgctgatggggtcctcataacaggacgacccactctccccagtactgacctctgctgtgttctggccttggttctgtcacagccggtagattatttccctttgtgacacacaaaaccagctgggccctgggtctcctcatgctctccagtgctccaggaaggcagaatgatgcccagcaggaaagtgacagaggtggctctgggggctagaaaggggctcactgggtgatggctgggaaggacccacccgctatcttcagtgtcaccagcctggcctctgacccagggacagagacccaggcctggaggtctcgggaggatccccagctcctaggtgtggagggaggtgtcctgtgtgtcctgggaagagaggactttgatggaaggaggtgggaggctctgggttctgctgtccttggtgaaggtttcagggggaccctctccatgtctggggtctgtgcccccagcttaactctcattctctttgcaaatacatatattttgtggatctgcagttgcctgaactgtctcatgtccctaaatctttgtatccctttttacagaaggtcaggaagggtgtgtacatgagtatgaggactatctgatcagggcgagtgtttgtttcccaaagatctctttagatatggtataatacataagataaatgtactgaattagcaattttaagtgtagaattaaatgatactaattctattcacaatgttgtacaaccatcaccataattttttaccagaaaatcttcattataccaaatggaaacttcatacttttaatcaataactccccacttccccctgccccacccactggtagcctctgatactatcaatctctgtgaatttgcctagtttacatgtctcatataataaggaattatatacgtgtattatttttttctggattatttctcttagggtaacacttttaagattcatccacgtcgtagcatatattacagcttctttcctatttatggctgagtaatatcccaatatatgtttatacctcaattttaattcattcatctcttaatggacatgtgggtggtttccacatttttgctattgtgaaaaccgctgcaatgaacttacacttggaagtatctgtttgggtttctgtgttcatttctttgggggtacatataggagtataaatatggggtcatgtggtagttctatgtttaagtttttgagaaacagccaaactgttttccagtttgctgtgctattttatattcccatcagcaatatacgagggttccattttctctacattcttgtaaacacttactatttaatattttttaaaacttatagccattctagtaggtgtgaagtgatagctcattgcagttttgattttcatttccctggtggctgatgaagttgagcattttttcatgtatttactgacaattttaatattttttagagaactatttattcaaatcatttgctgtttaaaaaaaatgggttatctttttattattcagttgtaatagttctttatatattttagatacaagtcccttatggggtacatgatttgcaaaatttttctcatattctgtgtcttctcactttcttcatggtgttctttgaagcacaaacatttttaactttgatgaagttcacttatctatttttaattttgttacttatgctcttgatgtcatattgaagaaaccattgcccaatccaagatcattaagttttactcctatatgttcttctaatggtttgataagttttgctattccatttaggtttttgaaacattttgagttaacttttgtatgggctgtgaggtaggggtctaactacactatctcgcatgtggttatccagttgttccagcacaatatgaagaggctaccattctttccccattgaggaatcttggcacccatgtcaaaaaccaatgggctgtaatggtgagggtttatttctggactcttgattctattccattgatctctatgtgcattcttgtgccagaagcacactgttttaatgattgtagtgttttagtaagttttcaaattaggaagtgagtcctccaatttttttttccagattgttttggccattctggggtgacttttaaaaaagatgtagttcaatggttctcaaagcaggagtggttcagctctccttttttggcagtctggagacctttttaggaccttaatctaagtagataaattattcccactttcttttctgagttgctatgttacagtgtatattgacacccatgaaataattgagagaccctggaagtgcttgcctacatagtgagggacaattagttccatgatcatgggcacagaagattttgttttgggaaacaattttgttggtggagttatattcatgcttactcttttatttgtcttcatagcctgcatctccttcagacttcatatctgtttattttcttgtttgtcctctggggtttgggtgttgggtgaccagtcagctggagctggaggaggtgcttagcaaggcagtgaccctggttgggaggagcagggctcagcagggtgaaagtagctgggccttgagtcaggagtggcatctggaaggcctgactgtaagggtcagaagggccagcaggtgggtgtcctaggcacaaacggtggctgctgctgtggactggaggaaggtaagaggccccgagtattccatgttcttactggctccccaactgaggattcctctcctgggctggtgctgtcctgcagcagggaggggttagacagggacggctgcacatcaggccggagtccatgtcatcctcttaggcactgtcactacagattgaggattctgttcataagccaagcctttgcacaaggaagggacccgggctctcaaggaagagcagctcctggtcagacctccatctccttctctctcattgcctgaggcctcaagcttggtctacctggcacaggggtctggatcctcctcccagggttggggtcttactgagctgggcacctgcaggtgggagaagatctggaggggccccatctgccttcaccagattgatgttgagggtccctgagtcctgcaccactatcaggtgctgagcaacttccagtgtcagtgacaaccaccccatggtggaagcagaaccacctcgtgagaaagcacctccaagcctcagtgcttgccatgtgtgggaatttgctggtttcagttgggggcatgttggtgggtggtcatgaattcagggccggattctatgctcacagtgcacatgctggatgtggtacagaccccaggcagggctcagtggggtggttttgggtgtgcacaggtatcttttctggaggagctggtggtgatttggctcccagaagttcctgagctctgcagactcaccaagcactcaatatttgagtgaacattgggcgagagagcagaaggtaagtgtcagggcatcggggttggtgcctctgggaagaggaggaacattctgggaacaaagctctcccccggcttacagggagcttcccatcgctcctgccttgaggatcagggaaactagggcctctgctcttccaggggctgcttgcaggcagtttgctctgggagggggtgacccaggagttgcctctcattttgcatttgagatttaaaaggagaagggacagtatatcttgccaggtcacaaaaattacaggcatcatattgactgaagggcactcctgtcatcactgcaatataccagaatggtcttttaaaaaaataagtgatttaggtttaccagcaactgtaatgcttgttttattcttctagttcaccgttaatgtcacttttgtagttttagcactggcaatgttgattttatgttgactctgatgattttaagctttcatttgttcacatagagatcatcttctttctgaatattaatgcattttttctctatttctactggttattcctgtacatagagtagagaatcacttttcccaaggaggtggaaagcttctgactaccaaaaaaaaaaaaaagtgtcaaaatgctttaaagtcagtaacttaaagatcaaatccaagagtgggcaacagattctgcccagggtctgaaaggtggagaggtgactggtgaggatgtttaaaagacctctcctctctactccctaaatgggggccatccagtgttcttgaggttcagagaaggcccagggctggggcagcagggcactgtcagctcccagctcccaggggccaggagtaagaccccaacactgtccagacactgattgcattcattttgggggagagtagattcttatttaaagaataatacaaaagtctacaaatatgaacataaacagaaattcctttgctacaattttccccttaataagacattccttcctaatgacatatgtgactgcattcatggctgagatgttttctaggatggtgagagcatcagagtggactatctggtgccttggggtcatgcattttcttcttccaatgtctacaggatcccccatgtcccactttgtagtgtaactcagtgtgtgtcattctggtttttgttgtatagatccttggaaagcccatgtcattcctgctgtgaggtacaggcagccaaatggcatcatctctaaacatgccttctcctggtacatcaaattatggaataaatgaaagccattttgacagatattgaagatataagtttctactcttcccacacatgcttctcccaagtgaaggattttactggtgaattgttattagagattagtgtggatcagtgactctgccaggggaaattttgccctctaggggacatttggcaaagtctggaaacattgttggttgtcagagctgggggagggagtcctgctggcattgagtgggtggatggtgctgaacaccctgcagttcacagagccccaccagtttgaccacccaaatgtcaatgctgaggagtggagagccctgctgtgccctcccgcagcttccctgaagcttcccctcacctgctcctcccatgtctccccaccacttccccacttcacccgcctccttacacctcagtcccctccacctgaactcaccccttagtccaaggccagccctgatctccgctctcctggtctccttgctccttagcaggaggcgcccactagatggcgcccttgcccttactggagctcaccgtctccctttccaccctgagacaaatgtggctgcttttactgccacaaccccagccctccacactctagatttgctcagggagcagctcctggacagacctcagggaccccagggaggagcctcactctggagattttgatggcatggtctttgaacttcactgttacccccagtcaggatccaggatgttgggagtgcatgattctgcccggtcccacttcagcaggaccccactgctgagttgtctgtggggacccgggcctctcatctccttcttgcattgcaggagagggatcttagcactgctttcacataaagtcagataatggaggagtgcaggtgagtttgggaaggtggacatgaagagaggttgtgtccctagaggtggcagcagtgagaggatgggcaggtgggaggaacacagcccatccagggttgccagccatattaggagcgacagcctttcctctaagcctccagcctttttcctgaaacattccagaactttccacttcagcacttcccactgaggctcctcaggtctgtccctgagctcccagctgagcctacctacccatctgaaatcctgagtcctgtgtcaccctcgttccccattattctgtgcagttctgtgggacgcccagctctcctgacacccccagtcttcagaatggccatcagcgctgtcgctgtggcaccagggtgactgccgcctggaggctgagtcctggcttcctgacagctgtggggcccgctctaggctcccttgtcctgatcattcatcacctccaggatgcacagcagctgggccagggggaggagcagggacaggtgtcagccaccctgtgtgtctgcaagtcaggctgggggtgtgggaggacgccaggaatgactgaactttctgatttagagggtgagagcttgcactgatggaatttgggatttaataggaaaagcatagcgttttcctattttgtaggcagggtggctggagtttggaatcatagattcccctgggatgtcactgtggacctcagtcccacccgttaggggcacagatttcagaatccacaccctggggcaaagcaggcatgggaggctccatcagcctggccagggctctctatttgtgcagctgctgcaaggagatgtgcactctgatgggaacagtgctccctcctccttggggggcagtatctagctccctgcagcccctctccctgcaggccctgccctctctgaacctcaccttccccaacccgccccccgcaatcccatctcagctgtaatcccaacactttctcatccattatgggtggactgcttgagcccaggggttcaagactatgctggctggacaatatagcgagttgttgtctctacaaaaagacaaaaattagctgtgcatggtggcatacacctgtagtcccagtcactcaggaggctgaggtgggaggattgcttgagctggggaggctgagttggcagtgagttgagattgtgccactgtatacttcagtgtaggtaacagagcgagaccctgtctcaaaaaataaaagtaaaaaaaaaaaaagaaatatggaatacattattgttaactctaatcaaccatgctatgcaatagtccaccagtaataccagtaatagccaataatgaattatctgaaaaagaatacaatttattcttagctatctactgctaaaatttttaagctatcttttatgatagctgaaacaaaagaagtaaatttaaccaaggaagtaaaagacctttataatgaaaactgtaaaacattgatgaaataaattgaaaaagacacacgcacaaatagaagatattccatgttcatgaattggaagaactgatattgctaaaatgtccttaccacccaaagtggtctacagattcaatgcaatttctgtcaaaacaccaatgatattcttcgaagaagtagaagatcctaaaattagaaaccacaaaaattcctaaaacctgcacaaaacaccctgagttgccaaagcaatcttaaacaaatagaacaaagctagtggcattacacttcctgacaatcaaagcatactgcaaagctatagtaaccaaatcagcatggtcctggcataaaaacaagcacatagatcaatgaaacagaataaaaatcccagaaataaacccatgcatctctagctaactgattttcagccaaggagccacatgcacacaatggggaaaggacagcctcttcaataagtggtgctggggaattggatattcatatgcagaagaatgaacctagaccctatccctcaccatgcacaaaaaattaactcaaaatgtattaaataaagacttaaatgtaagaactgaaactatgaaactactagaagaaaatatagggggaaaatccatgacattggtctaggcaaagagtttttggataaaatctcaacagcataagcaacaaaaccaaatataaacaaacgggatttcatcaaactaaaaagcttttatacagcaaagaaaaaaaaggccagcagagcaaagagacaacctacaaatgggaggagaatatatttgtaaatatatacatatatatttgtaaatatatacatctgataagaagataatatccaaaatatataagaaaattatgtttctgtatagttttatctgactgggatacagaggccacatccacagtcccatcctcaaaggccacttgttcccaaaatgtcaagcacatccctcaatgatccatcatcaacacctatgtctgtaggatgaagggtgaatcatgaagcactaaaaaggaagaaggaagccaatcccaaaacaaaatgatgcagggtctggaaagtccaaagcattttttttttttttttactgcatcttcctcctttcttctccacattcccaatcctcactattgattaacaaaacaaaaaaaactgggacccaccatcttccctactgtcaggagatctagcgagattgtttgagtcttagaccaaactttgccataagccaaatttctggctgactttacaatgatatgagctagcacagtctctttttctgccagtcaacttgtgctcggttttatttgcaaccaaatagaggtggtaaccaaatataggtgaccctaaaattagtcatcaggatgaaatcctaaaatgtgcaacaaactgggttgaattcaggattagtagcaacatctctgttgtgggcttgaaaagggggcacccttttatgcagtagcaaaattgctaaattgttgtttgctgagtctttggactctcatcccggattttctatgaccattcaaacagggctgcaatgaacatctatggttgtttagcttggcacacttctacatttctatatagtaatatctagaagtgcatttgctcaatcacaagatatgcacattttataattgactgctatcgaactaccttaaatagccttaatttgttctcaacattgtttaacagggtctgtttaatgtcctacgtccagcaaggacagtatcacttttcttaatatttttcaaattattggaccttaacaaatacttaatgtgcaattaattgattcctttgtattcccatgccttcttttatatgtttccttatagtacacaaaaccacattattgtttctttacttgtgtcattccaccctggaccattcctatctaaactataacattatgagagagagagagagagaaaacaatatgaaaatataaattgattaatcaaaaaaatttaaataggacaaatcaggaagacacaagagagattttaaaattattcagagaataccacaatagctgtaccaatatattttaaaacttagatgaaacggacaactatctcgataaatgtaaattaccaaaactgactcatgaaaaaatggatattatgaatagagcaataatcagtaaagcaattaaaaagacagttgataatttttatttactgacaacaataacaaaatttcaggtcctgatatttttatggtgaattttaacaaattttcaagctcctcctcaaccaattctcagaaggtttaaaactttaacaagaaaacactttctaacacattttcagaagctgttatagcatgataccaaaaccacacaagaaaattatagaccaatctcacttacaaatatacatgcaaaatcaaacaaaatcttagtgaaccaaattcagaattaataatagcaaacaagcaaaatatgttatcatacgtatggcttatatcaggaatgcaagtatgtttcaacatcagaaaatacttctccacattaacagactaaaggagaaaaacgcttgtttaattatctcaataggtttttagagaattttgaaaattttataaagttatgcgtattctgtaaaattgatgaaatccaaccttgatttatttttaaaaattgcctttcctatagaattataggtaaaggaaacacatgcatcctcacagagctacttcaaggctaagttacttcccataagtaacgtatcctgtaatgtgtgcttggcacatattcaatactaaacaaatatttgcaaatcctcaaaccacttctcgctcaaataacccacctttgtcttttgcctttatgttagggttgattttctcaattgtatcttggagatcctttggtgggtctttcagcaattaccctgaatttgcttttctgtttacaattttaattcctgggaactctttcttgttctctgactgcacccttttcatgagagttcagccatcaatcctccagaaccccaccccccccgcccccccaaaaagcaataaagatgtctaaaagcttccttctgggctttcgaatgatgtttaccccaggcatttgttctattcgttcatcacccattttccctacaacttgcctacacttgatatcagatttttatttattagtcacctatcttcttcattggcccattttcctattttgccactggttgttctcaaatgtgttatgattcctggttgtacagtcaagtggttgataatcttggatatacgataaagatttgctctgtagctgtgtgtaagcctatataaaagcttttgtatttttcttcttaaaaaagacaaaagatggttgggaagatccctccagttcaccagttcgaggctgcagtgagctatgatagcgccgctgctctagcctgtctgtctgtgaaaaacaaggggggcggggggcgggggggaagactggagatgtaaatctcccgcagggccctacccgtatccgcaacaggtctctaacaggaacagcctcaggcctgtgttggaacaaggtaggttacagaaatctggaagccagatctgtaacttcagggtaaggactggctctcagggctgatcccccgggctgggtgtcccagaggcacccgcccccgccccttccccaaggcaggccaggacaccttcactcctctccttaggctccccacccccttctcctccccactgtgcctcctggagtagcggtggcggtgccacaggggagcggggcggggcgggctctgagggcaagggggatgggccccgccggggtcactggcggccaccctggaaactcgacgcaggccggcccttctagtgaatcgtcccagccacagctggcctcccagccgcgcttggggcgcctcggggcgcgaatggtgcaggttggggagactcaccacgcaccgtcgggggtcggtccggttattcctcaccgctcggctccagtgggcgcgcgggcctctcctcctcagttcctgcgctgcagtccctccctcacccttcgcagcttgggaatccaactgtgtcattccgacggagcgccgtgaggacctccgagggtgttagcgccaagtgatctctgtccagcgctctgaatatccaagtaaaggagttcaatgaagggcgggtcaacggaggagaaaccgtgactctctcaagggagcccaaggcctccttgtctaattagtgacgcgccaatggatggaggctcttcccaccatctcttcccagcatccagtgacaccaccgccaagggacgggctcggcggaacctgcaggaaagaagcatcggctgagcctgactgcagcgctgtgaagagacaggggaggggatcagtagttggtcccgcgcccaccccctgtttccgcgaggggcggagttgactggccatgcaggcagagggcgaaatgtgaaattccactactcctaccgtttttccctgacccgatggggcggagtgtcgtcaggctaagttccctggcggtaaggtggggagattgaggcgcacacctgccgaacggtaacgcaggattagctaaggcgagctcaggacagaagcctcccgaggagcaggagggcaaaataataaataaataaataaataataaataactcactccttggtctttatttgcggcaggaattcagaaggtgaaagcggggccttaggatctttctgaccttttgggttttaagcaggaggtgtcagaaatgttaccacagggctagctggcttgtggccagcaagcgttcacaatgccctcgatttttcatccctctctgtgggttctttttttcattgtaaggcagaatttctacgattgctcacccactcagagaacctgagctggtttagaccaggtgagacaggctaggtttaccctggtgatgatgtgttgttgccatggcgatcctgcccagtaccagaggccctgcagattcagatgcttggtgcctgtgcttggctgaggggccaatgggtgaagctgccatctgcgggatgatgactgaagcctctaagtcagaatccgcccaggctgagccttagggcagctccatggagcctcggctggcctgggatagagagtccaccactgtgccagcccccagccactgcctaggtcctgtgctgagagccccttgtccagggaaatggcgtccagtggaaaagggaccacccccttgcccttcactcaaggcaggttggtgacaaccctgaagctaatccgttcctagaggagctgcttctgggtccgagttttctctgcagcagagcagctccctggatgggatctgttcaaagtccgcctttcacgcggaattttccgtccttgcaattttccacctccaccactaggggatcctctctgaccgcctcatgccggctctggcctctgagcaggggtttctcttctgcatgtgcgaccttgcgcatgcctagtggccttttgggacctagagctgctccacaccccgatggggttacagagtgcctcgcctccactccaccccaccagggttccttccctggctgggatgggatttcagaagcgccgaggaacagcccagacaggtgtgggagagtagccaaggcccctgtcccggggtggccaggacagcggtggcctcgcataggacctggctgggctgctgcaatcagtgtcctgccccttggagagcaacagtgaaaacaacaagactatcttcacccaccttaagaaagaacagaaccagtatccccaactctgctgtgtatcccaacccaattccattccccaccccactctcagtagccaatatgcaaaatattagaatactcttactgttattattttcaaccacactctgcatcctgaaaaaccatatatttcgttatgtgcttttaaacttcttgaaaatgaaatactgaggctgggcgcagtggctgacacctgtaatcccagcacttcgggaggcggaggcaggcggatcacgaggtcaggagatcgagaccatcctggctaacacagtgaaaccccatctctactaaaaatacaaaaaattagccgggcgtggtggcgggcgcctgtagtcccagctacttgggaggctgaggcaggagaacggcgtgaacccgggaggtggagcttgcactgagccgagatcgcgccactgcactccagcctgggcgacagcgccagactctgtctccaaaaaaaaaaagaaaaaagaaatactgaattttcaaatacttgctttttttttcggtcaaaattatgttctcaaatttcactcctgtagatgtgcgtggctggctgtagtttttgcatttttattattaggtattctcctgttgcattaatatgccacattttatttctctcatgtttttggtgaccacttggggtgttttttggttttgtatttttgctgtatacatgctgccatggtggacatacctctttatacatatttcctgttgtatgcagacacaattttaggatgtgacatcttcagcttttctattgtgtcgtgtgtcttttccttcgtgctttgtgttatttacatattctggacacagattctttgtcaactgtatgtgctgcacatctctttcccagtttgtgtcttcttcttcttttttttttcttaaaaaaaactttctttatagtgttttttttttctttctttctttgttttgttttgtttttttgagatggagtcttgctctgtcacctaggctgaagtgcactggccgatctcggctcactgcaacctccgtctcctgggttcaagtgattctcctgcctcagcttcccaagtagctgggattacaggtgcctgtcaccacacccagctaatttttgtatttttagtacagatggggtttcaccatgtttgtcaggctggtctcgaactcctgacctcaggtgatccaccctctttggcctcccaaagtgttgggattacaggcgtgagccacagcacctggcctgtgttctttcttaagtagatgttacttttaatataatagaatgtatcatattttgcttttatattagtactttttctatctaattcaaacacatccccaagggtctttgtgtgtagactgaccaatttctcaagaatcatgaatgaatactgcttctctttccccaatttatctgtaatgctacctttattataaagtttctatgcatgtgtagaaatagttcctgatttttcactctgtgccaccagcataccaatagcacgctgtcttaaatattaaatagcagagctttatgagacaacttgatgtgcagtaggcaattgcccccttgttactcttcttcagggttctttgttgtaccacatgaattttagaattggcttgtccagctaaaagacaactgcaaggattttatttggaagttcataattctatacataatttggggaaagtattttcataataccaagtcttcctattaatgaacacagactctctctctctctcccccacccccacctgtttagttatttatatctttatggtctgttagttattgtttattgtctttcaaccaggtttcatgtttttctacatagaggccttgcatgtgaaagtctttcttcctagcttgctattacaaattttttttaattgcactttttgggtacagtggcttgtactgtaatccccgatacctgggaggctgaggcagatggattgcttgagtccagaagttcaagaccagcctgggcaacataatgaggtccctgtctcaaaaagtttgttttaaaaattgcatttgctgttattcaacaaatgtcattgtgtctcatatatggatttttatatctgataaccttgttcaacaatcttttgattctaacaatatatcagattcttttgagttttccatatagacaataatgtcatctgtaaattataattgtttcttctttgttatttcttggaccttttattttatatttttgtcttgctgcaaggcaatatccctctatatattgtggggtcttttttctcataaagtggggatggtgaacacccttgtcttgctctctgattgtataaagcatgctttctgtagcattttgtagacgctcttttttagattgaggtaattcacttttatttctggtttactgagtttttagcataaattcaggctgaatttgagctaaagctttttctggagacatcatttgaaaaattcatatgatttactttctttaagtcaccaaagttatgatttacattgaactgagtttctactgtttaactgtattcttgggagaaaacccacttgtcactgaacaatatctgttttatttactgctgtcttgtgtctaaattttcttttaggattttttgtatatgctcagattagcctgttattctcctttctgtatttttttctggtttgggggtcaaagttataatagcctcacaataagagctaagaaaccagccctaatggaggccggggcaggaggtttggagttcaagaccagtctgggcaaaatagtgagacccccatctctatgaaaaatagaaattagccaggcatggcagtgagtacctgtagtcctaggtacttgggagggtgaggcaggaggattgcttgagcctaggaatttgaggctgcagcgaactatgattgtgccactgtactccagcctggatgacagagcgagaccctgtctcaaaagaaaaaaaaagaagaaataaaaaggaaaagataaaagagctaagcatctgtttccttttttccattttctgggagagtatgtgtaagactgtaattaactgtttcttgaataatgggagaactctgtaaaataatctggctttggtgttacctgtattggaaggatgaaaaataccaattcagtttcattattggttgatagggctactcatgctttttgttttgttttgttttgttttgtttttgagaggaagtctctctgtattgccctgttgtccaggctgagatgcaacgttgttcacaggcctgatcctggctcactacagcttctaacttccgatctcaatagatcctcccgcctcagccttcccagtagctaggactacaagcatgcagcatcacatccagcctcttttcctgcctgacccagttctggtttcctttagttttctaggtgttcatccattttatctaatgtttaatgcatttggcataagggtgctcagtgtcctttcattgtctgttgtctgtaactgttgccattttcattcctatttatgagtactggcgtcttctctcactttttcttaataatcctgctggaactttgctttttaaagaacatcttttgacttgttgattcttttttcatacatattaactattttcttattttttgcctttatatttatttcttttcctgtttgaaacattgctcttttcttactataaaaatgggtaagtagctcatgaattaccacctcttttaaaaatcttttctactgtaagcattttagcagtttacatttgcccacaagtaccacttcagctacaccctatgtgcttttacataaagtcttcatttttggtaagacatattctcaaattttaattatcacttgtttttaaatccatgatgttttatttgaaatgttgtttctaaagatacattttctggttatacttttattcttctaatttagcacagtggccacaaaacatggtctgtgcagtgcatacaatcgatgagtaatttctgagctgtagtatttggcataatatatggcaaaatttcctaagttttccatgtgtgctttaaaaaacttccagtaaaatacataaatctgttagatcaagcttctcacattgttcaaatagtctatatgtttactgattcatttgactgcttgatttatcaattacaggtaggaatgtattcaaatctcctattaaagtgtgacactcaagtggctttttaaagacagagatgccaaaccaatgaatacatgattttccccaaagcctgcacaaattctctaatgaaattttaccatgaaagtttgtttaattaaggcttactaaagcagtatgttgtcttttactttttaaacagagaatatatattttaatacatcgtttaagtttatgattaattatctattactgaggataagaatctttgcctgtgctcattcagcatttgcacttcatttatgatctgccttctcatagcttctgttaatttttatactagagacatttatttgtttgtataaatgttgaaggtttttttttgttgttgttgtttttgagtcagagcctcgctctgtcacccaggctggagtgcagtggcatgatctcggctcactgcagcctccatctcctgggttaaagtgattctcctgcctcagcctccagagtagctgggactacaggcatgtgccaccaagcaaggctaatattttgtatttttagtagagatggggtttcgtcctgttagccagggtggtctcgatctcctgacctcatgatctacctgcctcggcctcccaaagtgctaggattacaggtgtgagccaccgtgcccagctgggttttttatattataaggagatgtaatagatagatagatgtttcaaagatagtcaaatgtttttaaaatttaaaacacttttttacaggttgactttcaccatttaatttcatctatgtgttttgccttagagaaattttaaatgctatgtagatctcatgacttataattatgaagcattttgttttctgttttccacgaaacttagcttaactttgagcatataatagttgtaaaggtaggagagtaacactgaaaaaaggaattgcataaaaatggcacattttctgtagagttgtttatcgcctgaaaataggccccatttcatggaagtaagatgatcaggctcaggtccccagacgaaactcttggcatggtttttggagatagtccagggctcagtactggctctatcatttgctacttctcccaaagtaaccaatatctcatccaccctgagcccatttccatatctctaacatgaggataatagcatctaccttacacaccaagtagagggatcaaatgtaggaactaaatcaaagtaccagcactgaataacctacatcctcccacttcccaaaaggaagagagatgtatcccctgttgacaaacgagaccattttgcaggagagaaaggaaatgccagttcacttgcaatgtaaacatgctctctctttttagggatgtccagggacctgagagagaacccatgcttaccaaagagtttctagttccagacacacaggactcgaagggtgacaagtatggttttcagggtccctgaatccacccagtcctcacagaaactcctaaaagctgtcgattgacagcgttgagttcacagctctggtcctcacatgctgatactgcttgtgatatcgaacccgacaggaccccacatcacaattgatttaccaactacaatataatacctcctgaatctccaaattggctcacccaggaacaaaggcttggggtaaaactggattaggagatataagctctgaattttctgagggtgagacacacaaggattctaagtgacacgccacagagtaacgggtctgtgactggaggacccacagatttgtcttactggagacaccacatgcacacaaactccatccttagctgtggaaacaagggtcttttgctatcttagccgaattctgggagtaatttttggaggggaggagatctttgggattgcctctttcaggccctttacaaaaatacctacttcttaaatggtaaagcttacactaaactgaaaaaattacatccttggctttttatgaagtaggtgttggattgaatcactactggaagaagtatggcatcgcaaattctaagcagtggtcaaaggatggatctgttaaattagaaaaatctctaaatttataaaaagattttagattcctttattctaaacaattgacctatttgtactcatgggacaatcaaatttcaaaggagatatgtaacgatttcatggcttgcattaaaaatccttctgataaaattaaagataaaaaatctgaccccctgccaaaaaaatcttttgaagttcatactgcctgctttcaatattctgtgggattcacaatgaaaggtgccttatattgtggcctagcttcaagtttatgccttcgccaccatggcctgggttcaattcccagtcagggccccagcgcctttggtttaatgtttgcgtggcatttgacttttttacctatttagtattggtgagattacctttggtaaaaaaaagtttaaagagtggaaatcgcaattctttgtgttggctaaaatctgattataagagatctggaaggttttatttttctttttcaaagagctctatggtcagaagtcggcttcatgaaaagctaatatttaattatatgtacatacagtctttctggattttctcttttgcctcctgttttgaaaaatatttggatttgagtgaaactccgttttagaaattaattgcttggtacaatatacccatgtaactaccctgcacatgtaccccctgaatctataataagagttgaaattttgacaaaataaaattagattttgaattaaaacaaataggtgcttggttcctctgctcacttctttttaaaaggaattcctctcccatgtacttcttcttttcccttctttaccttccttttggcatctttggtatcacatgaagggatctagagggaattttaagtgactctgaaattccttgagaaatacacaaaaagatcccactcaccccttttgggggtctcctgttctccttgtggagtccagagtcagggacaggctcctccaggtctgcagctctgctctcttttatttcatcttggctgattgctttggttttgtgagtaccaggcattactttgtactgtgagagacacgtcctttgtgagtgcaacggctgctgggtcactggtgagggctgcagtttggagatggctgagagccgttgcaataaatggttgtgattgcagggggctccttgtttctttgcaagtttagatgagaaaggtgcagtttggacacagtttaaaggctgtgaaaacaccaccaatgaatatgatttcctttggggatggtctgattaaaagtgggctgattgttgctgtgctactagccttgaagacatgtttctacagcattgtgcagtgtggaaaaattgtgtggcttggtcttgtggcatgtcccttcttttagagacctcagattcaatgtgaaattcgggatttttgattttcaaagatctagatgccctgccttccagatgtgcctactcttcacatattttaaaattagatcctataaactgcaaatactttgttggcttctgtgagatcagaggtccagttagaaaaggaagacagtttgttaaaattaaaaactatttatctaatctaactagattggcctccaaatatgactttctgacattcagctggttactctgaaaagatttctaaatctcttgaggctcatctatatgtttccttgcaaagaaaaaaaaaaaaaaaaaaaagcaagcccaagcactagtaagaaaaagatttgcaatgtttcatgaaaggagtagatgagtgaagcatttatttgtagatactgggttggatacctgtgcaaagaagaagaggtcaataataaaaattgccaggggatttcttggaacttaacaagctgaattaaatatagaaatgtcaggaaatcaaggcaggaaatactcacttgtggttaggcagacagggcagggttctgagcttgagatggagcaaacagttgtggtgggtgaagttcacatgctttagagctcagctgtcctagtaaagaagcctaagagtctctaaagctcttatgagaagatggattttttttgcctagattaaaaggttaaagaattgctttaagttggataaaataaagctaaatgtttaagcaagttgtgaaaggtttatgaaaaaattaattaaaatatttttgtgtgtaaacatattgactaaagttgaaggggtataattcagcatttctgtaaattgagcattgaaataaaaacacaatgggtttctcttagagcactaacctgctctttaacaaaaattgtaaagggttatagaaagtctataaaaatgttaccttatggtcaaacattaaaattgggtaaatatgtctatcaggttttattaagaattaggtttaacattaatagtacactaatgtaaaggtgaaatttggcttatttggtacaaaaatcatacaggaagcattgtgaaatataaaatgatttttagctttctttgggctatatttctataaatatgttattgatgagggttccaaagttatgggagactcctataattctgctatatctcagtgtacattatcagtcataattataattgtcatgttaaattattgtgggccacagaggtaacagatttccttgtcaattgtgtctttgactatgactaccctaaaacgttcagtcacccatatacacatgttaccttgttttggccctctttagaaggtaattttataatcagctataaagccctaacaggtgctcttaaatgcaaattttgataactttggagattgtgacatcagaagagaggaaaaatgttcgggacacttggagagctaaaatgttcattgatatcaagcaggacaggaattaactgcatgaagtgaactaataggaggctgaagtgatctttttgactttttgcttaaaacgttgctgatcctttgttttgcttttcagagtcaaggcaaattttcttttgagctattgacagcttttaacgattaatcaaaatatactcctatgaacaccatttggagcattatttgtttctctctacccgatttccccagaatttggaaactatttgtgggtattcttaatttatggcaatatagttatttgcataagtgcaataagaatgtgttttctttggtaacaggacacaatttgaaaaactggttattttaccaaggttttgaccagaatgctgtgctttcctttaaggaatcaaacttgacttgtggagctaataaagcctttggaaaactgaccttatatcctgtgaacacagtccctgtacagggttactgatctgtgggaagaaaagaatgtcacattctgacaggtcaggaatcccaagttatcttgaaacttcaagaggacaggaattcacccaaccatatgtatttgatggtagaaatccatggcaggggctcagctttaaaaagtcttatctcagattccttctataaaacaaagtcccattaaaaccaattttaaaagcctatgtgaaaaataattattcttgctgcacctcgtacaaataaagtggcaaagcataataaagcaaattggtcctgtcgtaatttgtctttagtaaaaacgggaaactggggtcgggtgcagtggctcactcctgtaatcccagcactttgggaggctgaggtgggcagatcatctgaggtcaggagttcaagaccagcctggccaacatggtgaaaccccatctctacaaaaatacaaaaatgagccgggcatgatggcgggtgcctgtaatcccagctactcaaggggctgaggcagggaagcggaggttacagtgagtcaagatcgtgccacttcacgacagcctgggtgacagagcaagactccatctcaacaacaacaacaaaaaagggtaactggagagagggaagttatgtttcaaaaacttttggaaactatagtacacctgtttttaaattctagtctggcattcagtttttattattttctacagtttgggttaaattcgtatttctctggctacaagtctcctaaataatcttttcatttgtttcctttttctttccctttttccccatttttcttaattggaaatcactgaaacctaagctgtgctttcttaaagccctgtgaactgaagactagacaaccgaaacttctgaaggaagtagcagcaacctatttatatgtgttgctgttgcctactattatgttttagcaggtgctgcctctacacccccgaaacagagagtgctactgggaacaaatcgactttttccactccagtgctgcattcggtgccccataacgatgaccccctctcagcaggaagtagccagaaagattacaatgctccatctccctatgattcttgtgataaataaatatacaagcatgatagaaatcatgcgcaaattgacagtggggattgtggcaggccagatttcactaatggaggtccccatcacaactacttcagtactgactgagtggttaagttcagtatcaaaagctgaaagtgccagcgcctttctacaaaggctagaatgtaacaaaagcccaccaagggttttacctaggcctttcctgggccttacagcatgacaaaacaaagaaggaattcttaaccagacctgtttaggattaaacaaatttaattgggggtctgaagaaactcgccaggcctccacaaacaagttcattgggggtctaaaggaaccccccccaaacctctgtgattgagcaggagacaaggtcagggtaattgccccagcacctggactcatttagatttaagtaaatgtactgaggctccagagaaaggtctccaagacttagactagagttacagattaaaagaagttaatcacttatatctttagataaatgcacactgacacgtagacatacatcttagaaaatatataagctctggaaaaccttgtaatttacagttggtctggagatattttctgggccttctctctgtaaccggttccagaaataaaaaactctcttcctccccagtttatctgcatctcgttattgggccgtgagaaatagcagccagaccctgagtttggtctgggaacacactggctgggcttcctgcctggcggtagagcttcactgtcctccttcccagccaaaatgtggcccttgaaggcttcctccccaactgaccggttttgggttctaggtactcagggaacaccgtcttcaaggaggccattttcatactgttcctggtttgatttttctgaaattaggaaatgccccttgaggcatccaggattgtctttatttcccctgaagcttcccctcctgaagaaaaaagttctcaaacaccctcaggactcaaaccccaagttcaccctgtgaaacattcccatttcctaaacccaggcaggctcatggccctcagcctctcagaccccatggaaacctcctcccccacttcacgggttctctccatattgagagcctcccctcctcggcacacaacccagagactcaccccaacatgtgtagcaaatcaccctggaaacaatcatggctgaacgtggtagcccatgcctgtaatcccagcactttgggaggcccaggaggtggatcacctgaggtcgggagttcgagaccagcgaggccaacatggtgaaacctcgactctactaaaaatacaaagttcactgggcattgtggtgtgtacctgtaatctcaactactcaggaggctgaggcaggagaatcacttaaacctgggagacagagattgcagagagccaagatcgcaccattacactccagcctgggcaagaagagtgaaactacatctaaaaaaaaaaaaaaaaaaaggaaaaggaaaagaaaaaaaaaatcatgaggcaacattgcatttaacaatattttatttatcaaaagacacttgtctttctcaggtaagtgaaggtctagagatgaaacgagtcccgatgtaaattgccccatgggcattgctgagatcacaagatcatcactgcagcatgcagcacaatagtaaatttctcaggatggaagttcaacaatccaaaaggtagtattttttttcatgatgctcagtccatcatacgaaataaaaataaattccttttcatgatcatccattcagtagaaaaaatgatagtaaatttgttctcatgaagatttttaccgtaacatataggatttatcgttattattattattctttgttttttgtttttttgaagcggagtctcactctgttacccagtctggagtgcagtcgtgcgatctgggcacactattaacctccacctccagggttcaagcatttctcctgcctcagcttcccgagtagctgggattacaggcatgcgccaccacacccggctaattttcgtatttttactagagatggggtttcaccgcattggtcgagctggatttgagctccggacctcgggtcatccgcccatctcagcctcccaaagtgctgggattacaggcgtgagccaccgcgcccggcctcaatttatcattattcacgcatccacaaactgggttcttatattttgtacgtgattttttccattgaggagagatatctgtgcatattcatgctgctcatatttcatccacaaactcggttcatatttcatccacaaacataattttttccgttgagaagagatacttgtacatatttatgctgttcaaattcacatttcatcattcttttacaagaaatagataatgtattttaaggttttccagtggtattacagatattttactgggtgtatagatagaaattaaaccaaacttctttgttctggccgccagtcatgcatcctgttttcaacatagttcacatacaactggttgtgtaaaaatgaaattattttgtttagtacaatcatcaacagttggttgattagatttttaattatcaagttaatcattgtcattatgcttctcatcgcactcgtcattaattgctgtgggaggaaatttgttatgttccctatgagagggtgtatcacaaattcaaataagaattcaacgacaatggactgtataaaggaaataagcaagtccatggaaaacatatttttttccggaaaggattaaaatatttttaaaaaggaattaaaaaaaaattgggcacggtggcaaatgcctagagtcccagctgctcaggagatggagacagaaggattgcttgagcccaggaataagttggaggctgtagtgaacagtgattccaccactgtactccagccagggcaatagagggaaaccctctttctaaaaagacaaaaagaaacaaaacaaaacaaaaaaacaccacatcaaaaaacccaacaacaaaatgaaaaaccaaataacagcaatacaattggagctattcgatccaaagaagtaaatgaaacataaagcaaataaaagagaaaagctaatacctgtgtcctgcaggactcagtccaagttctgctctgactccctcctggtgagccaccccttaaaaagtcacttggggcggggttactttgacagacagtcttctgtcaaagagggaggcggtaaatagcacttttttttttttaatttaacgcctttccaacaaattagcggctatgttgtctaagagtgcaaatgtcagaggtgggtacaggcagcaagaccctccccacaggggcagcagaaggaggaatgactaagggaacaagactttagtgtgctcaactacacaggacaggaaacagatgctttttacaaaagctggtggacttgaaggcagaatattttcaagttcctgtaactgcgaactatgacctgtagcctgtgagagtgactttctgtggcaaaggagcttttgtgaatgtgaggaagttaattatcttaacagtgggaggttctcccggcttatctagctagaccctcgtgaaatcccaagtgtccttaggaaggggaagcagagagagatttgagtccagaagaggaagaaggtgatgtgaggcccagtaggggaacaaagggcgatggcatgtaaacacttagcccccagaagtgggagagggctggggttcatcacaccagaatccctaacaatcagccttattttaattacccttgaaatggaaggaggccttagagagccagaggcttggaggggcaccctctgctgcatacacagatcccaactgctgtgggctccaaataattgcaccagggaaatcacaaattatcaaaaataaaggatgtaaagcttttaaaaaatattaaaagcccaacaaataaaaaaagttctaaatctataaaattgacctcagtctgtatatttagatgagtcatgtgtatatagcgtttcacttcaaaatatatgataaatctctcattcattggcttaaaaataaacacttcaatcaagtctttatcagaaaaattgaaacgttaactcaattgccttttagttcatgtgactttacaaaacttaaaacaataaagtcagttttaaaaattattagtaaagtaaaagaaaaatatcttcacaatgtagacattttgtccacatgagacatgtgaaatattgccattactaaatatttgcaggtcaaaaactgtttccaaaacattttaaataatcatctggcctgtctgttttagagcattcaattctagctgaggtctggggacatgtgaaaggagccacggcccgactccgtgctgggaagagtcagacattttccacagctctgtcctttgctgtgggctctgcaactcctaccaattaaaattgcttacgtttttgttttatttttactaaagaggggttcctaaaagctaacattatactgagtatatgtaactaaaactactaagaaaacaatttcacaattatacaaatgtgccaagtaaatgaaaaaataaactgtattttaataaaggttataaaaagaaaaacatatagtggtgtgaggactgtctcaggtcttcactgagcaagggatcatgacattctatggcggacagctgaccttggctttctgctcctcttgattatgtctactaagtgacatacttactctttttccacctgtcttgcctctaagggtaacaggttttatgagatccctcctagtgctttgcaggtcagcctccctttgctgcattccaattttactgcctataccctccagctggcttttgatgacaaaagtcctggtcccagccattctcagattctgtcatccccgtgggcactatggagctcagcactatgggaggttccccaaaaatctcgttttctatgaggaatggccaccacctgcatctcagtgatgctagtgacccctttcctactcctgtgctcactggtcctcatgaagatcctggttggtctgtagccccctatttttcctattaaagagaaattacagtaagacccatttgtgtgcaaaatcaattttaggcttattacacttggcctgataatttgcataaaatgcagcaagaattcatcggccatataggctacttttgagttaattttcctgggtttttacctaaaaatatactattttggttagagtcttgtgaaaataaccaatgtgttcaattgttttattttaaaaggctcttactgaacactataaatatgtataagttgaatatacaaactatattgtcataaaatcacaacccaaaatgtggagaacgcagagggaaaggtaaatttgctcgcaaaaacatacttcacccaaataactggaaaaaaaaaaagactttcatgacccttctttaaccagagcagcagctttcaaacaaggtgtttgccttggaaatgccattcacaagccaaacggcccttgagagctgtctgtcaggcactgtagaatctagcagctcctcacagagttagaaatagtttcaggaaagagattccctgcttttagtaactgcactttatattcccagatagcgagattgtatgtaaaccatttttatcttattctggaactcttttgggtactttttttttttttttttaaatgatggagtctggctctgttgctcaggctggggtgtagtggtgcgatttcagggtatgagaaaatgcagctggacctggctctttccaggaagaccctcacagccaaggagtccaaagcctggggttttcatctaattccagtgtgactggggtaggagcagctttggtgctgggtgtgtgtgtgtgtgtgtgtgtgtgtgtgtgtgtctatgcctgtgtctgtttagggtgttaggctcgtggttgtctagatacaaatgtcccagggctcaggagccccagggttatgtcaggggcaccagatgaaggtgtcaacagaagttagggcacaagggacaaaggtgagagcaaggttagattcatttaggtgcaagaaatcatagagggaggagggagaggaagccctcctgctaccaccgaggaagaagcgcagcttaaggcagaaagcctgtccggagaggaagtgagtttgagggcagggctctctgggtaaagtacggtctgggacaccagcctgggggaagggtacagaatgcagagtggcctggcgtggggactaagaacagaggagagcagctttcactgggagggtcagtgttttcagtgtccagcactgagcaaggtgagatttgggcagcttgctgtgaaataaggtcaggctctggcattgtccccattgcgtgtgtgtgtgaggggcactttgggagagtgaactctccacctccatcctctcatacgtccttcaaccgagcttgccagttaccctgattccaaggagatctatttattgttgacaatactggatcctagcagaggctgggtaggagcctgggcacaagcaagtggaggagggggcctgggcctgaaagacctgggaggtttgagagaggacacagcccacagaatggagcagatggggtagagtcggcaagcattcagggctcctagtaagttggacaatggagaccctgaaagatccagtaaaacggggagaacaaacaggtccccaactcacatccttgcagtgcctggagcttcagactccagacaggtggggaaggaaaattgagggatgtgaacatgttggagaatgtcgtgccctgaagaatgaagaaaaggggggtgaggaatgagagcaggaacggcttccagtgcctggtgcccaggagaactcagaaaatgggtgtggtggagaggaatcgaggaaccggaagtggtggaagtgtgcagggcccctccgagatcactgtgactgccaggcgtcctccctggctggagagcttcactgtcctccttcccagccaaaatgtgtcccttgaaagcttcctccccaatggactggttctgggtcctatatatttgaaggggtggcctgcctctccacacctgtgggtatttctagttgggtgggaggagagacagagaaaagaaataagacacagagacaaagtataaagaaacaacagtgggtccaggggaccagcactcagcacaccaagggcctgcaccggcaccggcctctgagtttcctcagtttttattgattattattttcattatttcagcaaaaaggaatgtagtaggagagcagggtgataataaggagaaggtcaatgaaaaacatgtgagcaaaagaatctatatcataattaagttcaagggaaagtactatgcctggacgtgcactcaggccagatttatgtttctctccacccaaacatctcagtggagtaaagaataacaaggcagtattactgcaaacatgtctcacctcccgccacagggcagcttttctcctatctcagagttgaacaaatgtacaattgggttttacaccgagacattcagttctgaggggcaagcaggagacagtggccttcctccatctcgactgcaagaggctttcctcttttactaatccacctcagcacagaccctttatgggtgttgggctgggggacagtcaggtccttctcatcccatgaggccatatttcagactatcacatggggagaaaccttggacaataccccgctttcaagggcagaggtccctgcggctttccacagtgtattgtgcccctggtttattgagactagagaatggcaatgacctttaccaagtatactgcttgtaaatattttgttaacaaggcacatcctgcacagccctaggtcccttaaaccttgatttcatacaacacatgtttttgtgagctccaagttgggtcaaagtggctgggtcaaagtggctggggcaaagctacaaattaacaacatctcagcaaagccattgttcaaagtacaggtctttttcaaaatggagtctcttatgtctttcctttctacatggacacagtgacagtctgatctctctttcctttccctacatatattcatggaccacagtcttcaaggagtccatttcctcactgtttttggtttgatttctctgaaattaggaaatgccccattgaggcacccaggattgtctttacttcccccagagcttccactcctgaggcaggagcttctcaaacaccccccaagactcaacacctaatttcaccctctgaaaccttcccatttcttaaatccaggcagggtcatggtccttagcccctcagatgctgtggagaccttctttccctttcatacattctctcaagattaaaagccacccctcctcagcacacaccccagagactcaccccaacatgcattgcaaatcaccctggaaacagtcataagaccacactcatttaataatattttatttatcaaaagacactctttctcaggtaagtgaagttctggagaggaaaagaggagtcctgatgtaaattgccctgcaggccttgctgagatcacaaggagattgttactgcagcttgtagcacaatagtaaatttcttctctggatggaagttcaacaatccagatcgtagtatattccttttcattatgctcagtccagcaaatgtgatgataacaaattccttttcatgatcatccattcagcagagaaaatgtttgtaaatgtgttttcatgaagatgtttaccataacatacaggatttaccattatcaatgcatccacaaactctgctgttgttttttatacataattttttccatcgagaagtgatagttgtacatattcatgctgttcatatttcaaccacaaactctgctggtttttttatacgtaattttttccattgagaagtgatacttgtacatatttgtgctgttcatatttcatgtttcatcatccttttacaataaataggttatattgtattttaagtttttctaactgtagtgcagaaattgtactgggtgtatacatagatatcaaaccaaatttacttgttctggctgataatgcatcatttatttcatagattatgtatttctttgacacatttcacgtacaactaattgcataaaaatgaattttcttttagtatagacatcagcatgtgcttaattcggaatttaattgttgagttaaacatcgtcattgccttttccgttgttattaattgctctggtgggaattttgttatctcatacataagacagtgtgccacaatatctcttaaaatttcaatggcaataaactttatatttaaaaacagggaatctatggaaaacacatttttttctaaaggattaaaatatttttttaaaataattttctaaaaagttaggcacggtagcaaacgtctagagtcccagctactcaggaggctgagacaggaggattgcttaagcctacgagttgggggctgcagtgaactgtgattgcaccactacattccagccagggcaatagaagttaaccctttttctaaaaaaaaaaaaaaaagaaagaaagaaagaaaaaaagcaacaacaccaaaacctcaccaacaaaatggtaaagaaaaaaaaaacagcaatacaatgtaagctatttgatccaaagaagtcaatgaaatttaaaacaaatgaaagggaaaaagtaatacttgagtcctgcaggactcagtccaagttctgctgtgcctccctcacggtgagccacccctttagaagtcacttgggtcataagttaacccgataggaagtgtcctggccaatgaactagggaggtggtaaatggcaccattttaaatttaaattcacggccttttcaacggatcagtagccatgttgggtaagagtgcaaatgtcagaggtgaaaagaggcagcaggaccctcccctagtgcttgggcaacagaaggtggaatcactaaggggacaagactttagcatgctcaagtacacaggacagaaaacatgctttttacaaaagctggtaaatatgaagagggaacattttcaagttcctgtaaccaagaactaccgcctgtaaccggtgaaagtgactttctatggcaaaagcgtttttgaaaaggtgaggaagttaaatatcttaatgttgggaggttcttctggtttatctggctagaccctaatggaatcccaagtgtccttatggagcggggagcagagagagagatttgagtccagacgaggaagaaggtgatgtgagtctgggtgcgggacagggggagaatgatgctatgtggggatctgggctggggaatgacttagctgcatgagcggagtgacttagactcctgaactagaagaaatctagggctcatcacctcagcagccctaaccatcaaccttatttttattacaggtcttccatcgacggactccctaaaaagccagcggcgtggaggggcgccctctattggacaaatagatcttgactactttcggccctcaaatagcctgactaggcaaataacaaataataataatttttttttaaatcatggaaaatattttaaaaaacaattaaaaagttataaatctataaaatctgcttctgtctgtgtgtctgtatatttagatgtctcatgtgtacataatgtttcactaccaaaatatatgatgaaaccctcattaatcggcttagaaaactaaacacctaaatattttctcagaaaatacaaaaactttaactcaaatcccttttaattcacctgactttaaaaatctttaaaaaataaagcatgctttaaaattattagtaaagtaaaattagaacatcttcagaatttagacatttggtttaaattatacaggtcaaatactgcccttagtaaatattttcaggtcataaacaactcctgtaatcttttaaataattgaattacatgtctgttttagagctttaagttctagctaaagcctggggacaaatgaagggcaccatgccccctctctgtgctggaaagagacattttctacagctctgacccttgcagtaggctttgcaactgctacctatcaaaattgcctacatcctaagtttattattaaaaggagttgcttggagttaacattataatgaatatatgtaactaaaactatttctcatacaaagtatatgaaaaagtagaatgtatttttaataaaaagttataaaaagacatgaacatgtagtttttataaaaaacagtaattttgtctagttttgcagttctaaaaagttatgttaaattcaaaaataaaaaataacaagacaagactcaaggtttaaataagttgtaaaagatttgtaaaaattagttctataaaaattttacaaaaaaaagcattggttaaaatttaaggaattattttgtttttacagaaattaaacattcattaaaaacactctgatacaaggccttaatttgggttcatgtatcagaatagcagggttttcttagaatattaatctattctttaaaagaactatgaatgttatgcaaactttataaaaatcttaccttagagtcaaactgattaaaattccatagattttacgtaaaattttattaaaaattaacttcaacaaaaataaaatttgattttctcctttaaacaaaagttttgcgtaatattaaataataaagcatttttgtttaccttttaaactataaacacacacacacatacacatacaccaacactaaagtcagctgacctcatactgtctttattggatattcttgtttaaaaaactatcttctttggaaaataaagttttttattttaaaccatattttaaattatcattttgactaaatccataacatacagtgatctgtaataattctattttataatatcaagtgttttgaagaactccaggaacagccatgagagaacactgtggtttagtaacactttatttcctcagtttgaaaatagttgtctttcttggggaggccggtttcagcagatgaaaacaagagtcatgatgaaaattacccagcagtggttagtgtgaccataggaacattgtcatcaggtcagcagaaaacatatcagcaaatttttctcatactggcagtgtgtaggggtggatgtttacagttcctgaagccccagtggtcgtgtggtcttttagttttgccatttataggcaacttgtggtaactagctcaattagacacattccttatcacaaggacagagggctttctgtatcctagggttcttgccttggcattccagaagaatcaggtcacacgtggacgtggagaatgagtgcaaggttttattgagtggaagtagctctcagcagatgggggagccagaaaggagattggtttctccctggattggggccgttcagcagccctggctctcctctgactgccccaggcaaaatccacatcgttctataagtcggtgccctgctggtgtgctggtgcctgttgtcatgttcctcttcatgtccagccgcctgtgtgttcctccgctgatgtgctcctctcgacgtcaagcctcctgtgtgtctgactgctagggtcttggggtttttataagcacaggatgggtcttagcaggccaggatgatcttgggaaagacaacattcggtcaggaaaacaaaaatgcctgttgtcatctaggtccgtggggacaagcccaggtgtggagcttttagccagggaccacagcctcctgtatccaacacttcccttcaccttttctatatcattcaaagggatcatgcccttcccatcccagcacttcactttcatgtcatttgccccctctgaagaggtacatctaactgccattagaatatggatgatgaccagtcttagctgcttcctgctgaaagggggcattgttttgggggaaaacggcagtcagattcctcccaggggtctctataataaaagatcgaggtggctactttcaggaggtcctctaatgtactatctggtcccaagtcccatttctgcaacctcctcctgatgtcaggagctgcctgagtaataattttatcctttaggattatctgtccctcgattgaattaggagatagagaggtgtgatttaccaaggcctctcttagcctctccaggaaggcagtgggattttcatcaaatccctggttaattatggacaacttagtataattgagaggcttggtcttagacctacgtaagccctctattatgcacacctgaaagtgtctcctcttccagtcttccatctcattattgggatcccatttagggtccttcactggtgctacttctcttccagttggataatattcgctcccttccctgatgctataggtgatgcaaagctcatccccaaatctctctgctgctggcagagcagcctgcttctcagtgtctatcaggttctgactcaaaagtaacataacgtctctccaggagagttcaaatgttagggtgaaattctggaaagcttctatatatctatcagggtcatctgaacacttgcccagatctcccttaatttgctttaagtcttgtagggaaaagaggacttggaccttactgggcccaaattcactgggcatctgtaggaggggcaagagtgagactgggcttgtttgggatgaagatttctaggaggggccaggtgagaggctgaagctggatacggaggttggggtggacccagaggagcagggcttgagggagctggcacgtcagctgggggtgcgtctgggactcgtgtctttaattccctgggcttgaccctggcagccttccccgagacagcaaacaggagggctggaacaatcctacatgtcagcaaaggtctggattgctttgcaaggtatagaaagcctgcacatttggggcctcagaccatgtgtcctcacatccagagaaaagttctaattgcaggatggtattgaaatgaatggtcccttcctgaagccaagccagtccttcctgtaaaccataatttggccaaacctatgtgcggagggctatgagatgcttttcctctggattctgagggtcaaaacagtcccaatggttcaggatacactcaaggggagtacaagctgggggtggtgaggagaactggctgcccattctgaaagacagggaatagaggtgttcctcatttcccttccttcttttggcaaaaagctcagggtgtgatggggagggaaagcaagcatcttcacttcactttccacctcttacccctgcgccctggcaaccttggcaggtgccggccacaggtacaaatgcggtatgtacccatgaagcagggagaacctggagattaggaattaactgccctcacctatgtttccttttctccctgctgttgaaaaactttgagttccctgggcctttttatcccatgaggcatggcctccttctgtgggatggggttcagtcagcaggaattggtcctgtccatttacattgtgcctgttgcctggctttgaattcctcagacctgctttctctttctagggcctcagcctgaagcttggaattgagtttgggactgaaaaagcatttcagaggctgtttatatccatttagtgcctcaaataagccctgctgaatttgcaattatcagccagcaggggtcactcctctgttaacttccctattagaaacagagcggtggggattctcacttagaaaagaaaaaaagagaaaaacagttaaagaggcaaaaagtggggaatgctgggggaagaaccccttgcttagtgcaagtgggcccctctaatccttataactttcccatccttcccccagttcagaccaggttgaattccttggccatggaaggaaaggttccattgatgcagtgggtgagaagcactctgtagggtcctggctaccatcggttttctcacacccccctcatcccaggcagtggagggagacacttctgcgacattgctccccctgccccttcatggctattgggtgtggcctttgcctgctgcaggcatgcctaggtgctggagctgggagggaaaagggtaaggagaggtgccctggaagccgctcatgcctggggctgtcaaggtggaggcatacatggcacctctaggaaaaattggtctgatttgcacctttggcggctgagccaaatgctcattttacttagtaacattgcctcagcctgtagcaaaactcttaacattataaaggaagagataagatccatttcaaataatgtgtgagagagaaaagagatgaaaggaaaacagagtcttttacctgcaggaaagggagagaagtggcagagttttggaagaaaggcaggcccaacagtttcccattcactcacactcaccttccgagatcccagacgagccaccagttgaaatgggaaaagtttccttgtccccctcacaggaggtggagtgggggtgtggcttgcttctttagtactccgctgctcaaacctctagggaagcatacagactggcaagttgtggggctacaaccccatggcagcatctaggggtagatgtttacagctgctgaagccccagtggacatgtggtaccatgtgctcttttagttttgccatctataggtggctttgtggtaaccagctcaattagacccattccttaacccaaagacagagggctttctgtatcccgcggttgttacctaggtgtaccagaaaaatcaaatcacacgtggtcttggagaatgagtgcaaggttttattgagtggaagtagctctcagcagatgggggagccaaaagggagaatagttttcccctgaagtcgggttattcagcggcccaggctctcctctggctgccccagccaaactctatgtcaatccattggtcggtggcctgccagagtgctggtgcctgttggtggattcctctcagcgtcgagagtttttccctctcaggaaagggagagaagtggcagccacccatgtgttcttgcactgatgtgctcctctcgacgtccaacctcctgtgtgtctgcctgctagggtcccagagtttttttaggcacaggatagggcatggtgggccagggtgatcttgggaaatgcaacatttggtcaggaaaacaaaaatgcctgtcctcatctaggtccaggggcacaagcccaggtttggagccctagccagggaccccggcctcctctacccatcactttccttcaccttttctgtatcattcaaagggaccatgcccttcccttcccagcacttctcttctgtatcaataggtgatgtttttaaaatttcccaactctagtgcaggcatggtactagacatatacatagaaataaaaccacacttattcttctggctggcaagacatagtatttttgccaaattatgtgttgttttgaagcattttatgtacccctggtcatataaaaataaagctattttgttcagtacaaacagcagcattttctggattagaaagttaatcatcttaaaagatcatcacggatttttccattgcactcatcactaattgctttggcaaaaaatttcttatctcacgcatgacaaaatcagccgcagtatctcctagtaatttaatggtgatgatctttataaaggaaataagcacatcaagggaaaacataattttttttaaaaaaagagtaataaaactttttaaaagtcttttttaaaagactgcttttctaaaatagtaaaataaaactccaccaataaaaccaccaacaaaacagaaaagaaaaaataatgatatgatcggagctatttgatgaaagatggtaaattaaatttaaaatgattagaagagaaaaagcaatacctgtctcccgtaggtctcagtccaggttctgctatgcctttctcctggtgagccacctatttaagagtcgcttaaagcatatgttaatccaacaacagcagattaaaaaccaatgcaatctgaactatttgatctaaaaacataaataaaatttaaaacaaataaaagagaaaaagcagtacctgtgtcctgtaggtctcagtccaagatctgctctgactcccttgtggtgagttagccctttagaagtcacttggggtggggcatatgttaattccactaacattggttctggccaatgagtcaggaaggtggtaaatggcaccttttcttcttgctgatttctttcagttcctttggagtctggacattagtcctttgtcagatgcctagtttgtgactactgtttcctatactgtgggttgtgtgtttaccctgctgatatttcttctgccttgcagaagattttcggtttcattaggtcctattgatcttattctatttttatatttttgcgtttgcttttggggcattagtcatgactacttggcctaagccaatgtctagaaaagctttttggatgctatcttgtagcatttttagactttcaggtcttagatggaagtttttatatgctttgttaaagatcaggtgactgaaagtaccgggctttgtttctcggttctctattctgttccattgctctatgtgcctatttttatacttcctgcaccatttattgaataaagtgtcctttccccaattagtgtttttgcatactttgttgaagattagttgtctgtaagcatttggctttatttctgggttctctattctgttccattgctctatgtgcctatttttatacttcctgcaccatttattgaataaagtatcctttccccaattaatgtttttgtgtactttgttgaagattagttgtctgtaagcatttggctttatttctgggttctctattctgttctattgctctatgtgcatattttataccagtatcatgctattttggtgattgtagccttgtagtataatttaaagcctgccttcagatttgttctttttgcaaagtattgctttggatatgcggtcacgtttttggttttgtataaattttaggattcttttttctagttctgggaaggagaatgatgatattttgatgagaattctactgctctgtagatggctttggagagtatggtcactttcacaatattgattctacctattcataagcttataatgtgttcccatttgtttgtgtcaactgtgatttctttcagcactattttgtagttttccttgtaggaaacttacattaacctacttggttaagtatatttctaagtattttacttattaaaaattctcagggaaatgcaaagtaaaactgaggtgggaaattaaagaaaaataaaattaaaaagaaagggaaataagctttcttgtattaagctaacttgtcccagaggcagcaacaggcacagcccagacccaggaaaagtcttgataatattatttattgtattctggagactcttccagcactccttcaatgtagggagaagaaaaacaaattttcctttgttttatggtatgagtttatagattcttgttctctttaactagtaacttcaagtattctgttttatctaagaagtatggcaaaggtcatgagaagcctgagcaggcctgaactacagctctctaggcaccatagtgaagataaaccaatgcaagcctctttagagcaaaacctagataatagacatctgggttgcatagcaacagttatgtgcaatcctgagttatgaacctgttacaatttgattaactgtctttttcctgcctctgtatccctgctttcacaccactgtaagcttgcttcaagctggcccacccccttttgtgaagtgtgtataaaagtcaagtgctgtctttgttccaggccctgtctttggacgtgagtctgctgggcctgagagcactcaataaaagattctcctgttttaacccaaagcctctctctcatcctcctaaatcccacaacaaaaccacaatgagatgctatcttaatcttgctagaagcccataatttaaaagtcagaaaacaatagatgttggcatagatgtggtcaaaagggagcactttgacactgctagtgggaatttaaactagtccgaccactatggtaaacagtatggggattccttaaagaactaaaagtagaccattcattccagcaatcccattactggctatctacccaaaggaaaagaagttattccataaaaaagacacaagaatatggatgtttatagcagccgattcgcaattgcagtgatatgggaccaacttaagtgcccatcaacgaacgagtggataaagcaaatgtggtacaccatggaataatacttgataataaaaaggaacaaaataatgtcctttgcaacaagttggatggaactggaagccattattctaagtgaagtaactgaggaatggcaaatcaaatattgaatgttttcacttttaaatgagagttaagctatgagaatgcaaaggcataagaatgatataatggacttggggactcagggggaaaggttgggagggggatgaggaataaatgatgacatattgggtatattatacactgctcaggagacagatgcctcaaaatctcagaaattaccactaaggaacttttatccacataaccaaaaaccacatatattccacacactattgaaagaaacataaacattattttaaaaaataaagccacttttaaaattagcaaaataaaataaatatgtcttcagagtttagatattggatccaaattagacagatcaaatactgcctttactaaatattttcatgtcattaacaacttctaaaacctttcaaacagttttttgacatgtcttggaaccatccatttctagctaaggcctgggcacctgtgaaatagggccatgcccccccttatactgggaagagtaagatatttcaagactaagatgttttctacagctccatctttttctttaagctctacatcaaggacataattaaaattggttgtctcctaagtggtttactaaaaatgcatacttaagagttaccattataattaatatttgtatctaaagctacttaaaaattttcacacacaaatctgactgaacaagtaaaatatattttaagtcaaagtttataaaaggacatgagaacatagcttttatgaaaaaattagttttgtcaagtttagaggttttcaaatattttaaattcaggaaataaaataacaaaaagacaaaagaaaatggttgaacaacttagaaaaggtttgttaaaattcatcttataaaacaatctacatgtaaaaagtgggctaaaatttgaaagagattatttaggttttccataaattaatccagaaggggtaggaagtcttaagaatgaggaaggacaggaggaaggggaggtcatcctgacactgcagaggcagaagtgcagctgaaggtatgaaggctaagaggggaggggagtttgagtgctgctgcctggctgtcagagcagaggagggtcctgggcaccagacttgaggaagggatgaaaatgctgggcagacctgtagtgggcccttgagatggcagatagtggtttccagagagagggccattgttttccagtgcccagcactgagcagagagagttttgggcagtgtaaaaaaaaaaagagaacttacctctttctcgttttagaaaaagaacagtctaagaatatcagcagggaaactctcagtgcttcaaggggttaaacgcccttttggctttcttgtgttggtttcatcatagaggaggagaaacttcttggaagtgttcctaaaaacacaacacgtctgcttctcctttcaaaaaaggaagtgctaaaacacgaacactctagatccaaatattaatacggatgtctaaatgcttccgttttccaaggggcagaaagctaaaggttgtaacctattcatttcagtcaaagttggtgaaagggaagcaaaggaactgggtggggcttggaaggatgacgaagctcaagctcattggccagcaacctctctcctgggggcgggaggggtgagcatacgtcattgctttggcttctataaaatgaggaggactcaccgagtgtgaagagtccttctggtgattgcagctgagagcacactcacgacgttctgcaaggattctctgattatgattctgaagggaaaagcgatggaatggacagcagagattgtaattttctttatcttgaattacggaagaaagtatctaggacagaaatccacgacaagtccttggaaccagcagatctcttcgttcacggagacgttgacgtattctctattgaagaagattcttaccttcttactggacaaggttttgtcagttctgcgtgactggattgtccgggagactctgaggaaactgatgtcacatgtttttccaaagaagatgtttctggaaccaacaactgtgattgtggtttgaggacttctgagagttccagtacaggaaataagcagaacatcagctggaggctaaacggatccagacttcactcttcacttcccttcctattcagtctattgtgcctgctgactgagaagcttggctggtatgtgagcaaataaacggaactattcagaaggagatgttgacatattctgtattgaagaagatccttatcttctcacctgacaaggttttgtcagttctgtgtgactggattgtccggaagactctgaggaaactgatgtcacatgtttttccaaagaagatgtttctggaaccaacaactgtgattgtggtttgaggacgcctgggagttccggtatgcgaaataagcagaacatcagctggcggctgaagggatgcagcctccactcttcacttcccttgccattccatctattgtgtctgcctgactgagaagcttggctggtatgtgaggaaataaacggaattataaacaaggagattgtttctcatctacttcattctgttgtggcttttctattttggggttcagggtgtgtgacaaggaccaaggagatgaaaggtttcatgatggagaaagcccaggcaatcagattgaagagctatccacagggaatcttggctgctgaggggctgcaccctgcaacggactgaccatatgacagaaaagggttttaaaggctcaacttctggactgagaacccagagtaatttgggaacctcctctgtgaggagatatgaaagctgggaatcatgacatccctaggaatggaaggcacatttcctgatggaaggggtgctttggaaaacaggagcagagtagacacagcagccttgtggatacgggtgggcagcatgcatgggtgatgtgaacgtggagtgtttgtgatcgaaactcaaaatgtctgacaaagtgaaaacctagaaaccacaatgaggaggaagagtttgtgagggcaatcactctccccatgtgtgaaaatcgggggctcttaaaatctcatctggagaggtgcagtctaccaaactctgggactttagcctccccttttaaaaaaccgtgcatcaataccaacgtccgaaaccacagaaataacacctggcttgcatggagacaaggacaaaaagccgtcatgatgagttgttctgctcacttgctgcctctgttcagtgcacaggatattgtccacccactagcaggctactgcaagagaagtgtgcaatatgttccctatgtgccatatatgtgccatatggcccatatgacaactgagtcagaaaatatctgatgccctcagagttacactccacctggagcttgcccccagccatccaggacctaggctccctaccctgtccaattttctggtgttttgggggcttcattctctaaggtgtgcccactctttactcaaaccaaaacacccacatattcctgcccatgaacaaccaatcaaccacttctcagttccacatcctgctgttgggtctctagtggtgacactgtaactcccaggtcatagtggtgacactataacacctagctaaattgatgccttgtctctaggaggccatgggctcctgcaggtctcatctgactctctgtagccttccctgacaatgctcacaatacccaagccagagccacattgacagcaagctgctctcatcttacctttgccagacctggccactggaaaaggctgaccctcatcctgcaatgcctatacctccaacctttgtctcaagctggtgtcctggagggacttctaagcagaaaacagattcagactcccatcctctcctgaatggcctcatatccaattctcagaccctcagccttcattgtaaggacacttcatccatgcccttgagtattctgtctgcactgtgtattctgcaatagattctcctccctctgcgaccctcaactccttccgcagactttttgttttcttgatcatctaccatagtcttccactgggacactgccaagcccattctggagagtgagttgtgcaagtacactgccccccatctacctttcgggaggtgtatacacccttctttctcccaggtctggaggctttctattttcatcctgaggcatctccacctgctcttggattcttcaaattgacaaccaccagttaacaagaactatgtgtcaccaaatagccaaacaatggcaattacaaaaataaaattaatagctgtaacccccattagcaaggatacacaaatcaaatcagggatagtgggtgaggaagtctgcctaacattcaaggaaggattctgaagtgatacaaaatcattgcctttgctatctttagaatggacactttcagccaggcacagttgctcagcctgtaatcccagcactctgagagccccagttgggtggatcacttgaggccagcagcttgagaccaccctgggcaatgtgcagaaaccccaactctactaaaaatacaaaaatagccagttattgtggcacatgcctgtaatcccaactccttgggaggctgaggcacaagaatcacttgaatctgggagccagagtttgtaatgagcgaagatcatgccactgcactctagcctaggcattagagtgataatctgtctgtggaaaataaaaacattcctcttcaaagttttcttctttaaatcataaatgttggaattaatatatcctctttgaaactcactttcttcaagcttctttatttgatggtagtaaatctttgttaagctttatgaggcaagagtaatggaagaagcatattatatatatttatactctaacctcagtgcttgttctagcaagctcaggcatgcgtgaatgtgcccaggcatgttccagcccataccttatatcctttccttattgggaaatgctgttactcctataagcattcttgtaagcaacttcctctttttctttgtctccactatctttacctattgaggacagttttaggttcttagccagttggatgtagcatagactgtgaggtccaaccccagccaatggagatagcacacagcagtagcgacctcatgcttaacagataaatattcctgtctccctttgtttggggtgctctcagctgatgagcaacaccctttctaaagaaattaaagttgtcttgctgagaaaacttttggtctaaatgctgattcttccttgcagcactgaagaagaagcaattatttccaacactttctcatacacaaaaaaagaagaaggtggaagaaaactttcttgtgcaccctatccctcactcagaaagacaacagaaggctcctagtggcaagccctagaggattcatttcttttgggaaccctcttggctgggatactaggactcaggtcaaactcagcattttcagtgtgtgggaagtgtgcttgggtttcactgttacttccaataatgtgatttggtccttggggttcaccaaattttggtatggagtggtgaaccctgttaagtttaagtgtctataaaattaacaaagcaaaataaccattctgccccatggttcagagaccaaatattgtgtaggaaatgctttagcgagagaaacagagaagaataaaaaatgtcctcaagcgctgcattatttcttgttatcgtccagatcttagaggaaaggctttcattttccctcattcagtatgatattagctgtgcatctgtcatttatggcttttattatgttggggtatgttccctgtgtatgtagttttttcagggtttttgttatgaagtgatgttgaactttatcaaacgtttttcagtttcagttgaaacgatcatatgctttttgtccttcattctcttgatatgatgcatcatgttgatgatttccatatggtgcactgtccttgcatcctgggcatgaattccacttgatcatgacaaatgaatttttaatgcattcttgaattccgtttgctggtattttgttgaggatttttgcatcaatattcatcagagatattggcctgcagtttctttttttttcttttttctttgttttgttgtttgtttgtttgtttgttttgatgtgtctatgtctggttttggtatctgggtagtagtgttccatccccttttattttttagaataatttgaataagactggtgttggttctttaaatatttggtagaattccgaagtgaagtcattgggccccgggcttttctttagtggaaggctgtttattatggcttcaatctcgttacttattattggtctattcatgttttgaatttgttccttatttaatcttggtaggctgtgtgtatctaggaatttgtccatttcttttagattttcaaatttattggcacataattgcccattgtagcctctaatcgtcatttgagttcctgcagtaccaattataatgtctccttcttcatttttgattgtatttatttggatcctgcccctttttttcttacttaggctgcctaataatttcttaattttgttgaactttttcttttgtttgtctcgctctgccaccaggctggagtgtagtggtgtgatcttggctcactggaacctccgtctcccaggttcaagcaattctcctgcctcaccctcccaaatagctgggactacaggcaagtgccaccactcccagctaatttttgtatttttagtagacacgggttttcaccatgttggccaggatggtctcgatctcttgacttcataatccacctgcctcagcctcccaaagtgctgggattacaggcatgagccactgcgcccagcctaattttgtttaaattttcaagaaatcaacttcttctttcattgatttctgtattttttatttccattttatttatttaaactctaagctttattctatcttcttctcattttagctttggtatgcttattgcctctctagctctttaatgtgcattgttagattgtttatttgaagttcttcctctctacaccataagacgtaagcatgtcctcattatgtcataagatgtaaccacttacagctataaacttccttcttagttctgcttttgctgtatctcataggctttgttatgttgtgtttccattatcaattgtgtcagaaatttttcaatatttttcttaatttcttcattgagcaactgatcatttgggagcatatttttaaacttccatgtacttacatagtttccaaaatacctcttgtgatcaatttctagttttattccactatggttcaagaagatgcttgatattatttcaattttttttcacattttaagatgtgttttgtgacctaacatatggtctactttttttttttattaaactttaagttgtggggtacatgtgtagaccgtgcagttttgttacataggtatacacgtgccatggtggtttgctgctcccattaacctgtcatctacattaggtacttctcataatgctatccctcccctaacctccaccctctgacaggacctggtgtgtgatgttcccctccctgtgtccatgtgatctatttttgagaatgatccatgtggattagaatgctgtggaaaagactttggattcctaatatccagggagggagacgatgatattactttcaatatcacacgggtgtacacactctctgtgacattgttcctaatatccagtggaagagaggatgatataacacccagggagggagaggatgatattactcttaatattgcagggtgtgtacccatgcctatgatattgttcctaatatcaggagggggagaggatgatattactcagaatatggcagggggtgtacacacactctgtgacatggttcttaatatacaggggagaatgggacaatattactctcaatatcgcagggggcgtacaaccctgtgatttgttcctaatatacaaaaggggacagtatgatattgttcctaaaatcgcagaaggtgtacaacgccctgtgatattgttcctaatatccagggcgggagaggatgatattacccccaatatcacagggggtgtgcactttccctgttacattgttcctatgatccgagtggggggaaatgacattagtcccaatatcgcaggatgtgtacactactcccccatgatattgttcctaatatcaagggggagagaggaggatattactcccaatatcgcaagggaggtacatcctccatgcaatattgttcgtaatattcaggaggagagaggaagatattactctcaatatcgcagaaagtggacacccaccctgtgatgttcttcataatatccagggaagcagacgattatatgactttcaatatcgctgggagtgtacatcccttttgggatattgtttctaatatccaggaagggagaggattatattacttccagtattgcagccagtgtacacatttcttgtgatattgttcctaatatccagaaagggaaaggatgatattactcccaatattgcaggtggtgtacacccccctctgatattgttccttacatcaaggaaaagaaagaagaatattactcccaatatcgaagagagtgtacacccctcctgtgatattgtatttaatatccatggggaaagaggatgttgttactcccaatatcgcagggggtttacacccacactgtgatattgttcctaaaatccagtgaaggagaaaataatattgctcccaatattgcagggtgtatacaggccctcccccgttatattgctcctaatatccagcggtggagaggatattactttcaatttttgcagggagtgtgtaccccctctctgatatttttctaatatcaaggatgggaaaggatgccattactcccaatatcgcaggaggtgtacatgccctgtgatattgttcctaatatccagggaggtagaggatgatattactttcaatattgcaggggctgtacaccctctatgatgttgttattaatatttaggttgggagaaaatgatatttttcctaatatcctgggaaggaaaggatgatattactgtaaatattccagggagtgtacaccttcctaatattctaatattgttcctaatatccaggggtgggagaggattatattactcccaatatcgcagtgggtgtacacccctcctgtgatgttgtttctaatatccaagcgaggagaaaatgatatcactctcaataccgcagggggtgtacaccttccccatcatatcgttcctaatattcagagggaaagaagatgatgttactttcaatatcgcaggggttgtacacaacccctgtgatatttctcctaatatccaggaagaaagaggatgatattgctcccattatagcagacggtatacgcctccctgtaacattgtttctaatatcaagactgggagaggatgatatcacttccagtatcgcaaggggtgtacacctcccccgtgatattgttactaatatccagggggaagaggataatattactttcaatattgcaggggctgtacacccccgtgatattgttgttaatatttaggttgggagaaaatgatattagtccaaatatcgcagagagtgtacacacttccgataatattgttcttaatatccatgggggagacgatgatattacacccaatatcgcagggggtgtagtctccccttgtgatattgtccctaatattcagggaagtaaacgatgatgttagtgtgaatattccagggagtgtacaccccctttgtgatattgtcctaatatccgcaggagagaagataatattactcccaatatcgcagggggtgaacacaccccctgtgatattgtttctaatatccaagcgaggagaaaataatattactcccaatgtctcaggggatatacaccttccctatgatattgtttctaatattcaggtggaaaacgggtgatattactcctaatatccaggaagaaaggggattatgttactccccttatagcagggggtatacacctcccctgtaatattgttcctaatatcaaggctgggatatacgtggggggaaggatgatattactcccaatatcacaggggttataaaaccttctgtgatattgctcctaataaccatggcggaagaagatgatattactcctaatattgcaggaggtgtacactcccccattatgttgttcctagtatgcagaaaaggagaggatgacattattgccaatatcgcagggtgtgtacaccacccatgatattgttcctaatatttagagggacagaggatgatattactcccaatatcgcagggggtgtacacgcatcccctgtgatattgttcttgaaatcgaggggaaagagaattatatttctctaaatattgcagagggtgtacaccgccccctgtgatattgttcctaatagccgggggcggggggagataattaaattactttcaatatctcagagagtgtacatcccccttgtgacattgttcctaatatccagagcaaaagagaatgatattcctcccagtatcgcaggaagtgtacatttaacctgtaatattgtttctaatatccagggggaagagaatagtaatactcccaatatcgtaggggttgtacaccttttctgtgatattgttgcaaatatttagaagagagagagaatattactcgcaatatcacagggaatgtatacttcccctgtgatattgttctaatatctagaaaaagagaggataatattactcctaatattgcagggggtgtacacccccacttgtgatattgttcctaatataaaggaaggtcgaaaaacaaacggggagcccagggggaaggaaggcaggcgaggaagaggcagcgccggggcgccggagggagcagccgggccgcggaagcgcgagcacgagaccggtcgcggtcgcagtcgcatttttgccgttgtcgcggccgccgccgccgaggcttacccggggatgtctgagcccgcgcctcgcggcccccaagctccacgctgcgcccgctgtcccggcctctaagggccgccacgtccctgcggcgcgcgcaggcagaaagcggcttcgtgccggcggagggggcccgggcgggccgggaaaggctgccccaggccccgcgcctaccccatcaccgcggccggcgccgggccgggaggatgagcggtgtggggctctgaagcatggagggggttttgtacaagtggaccaactatctcacaggttggcagcctcgttggtttgttttagataatggaatcttatcctattatgattcacaagatgatgtttgcaaagggagcaaaggaagcataaagatggcagtttgtgaaattaaaggtgacagctttggaggggaccacccttgattggatacataaattctgttcattcagcagacaacacaagaatggaattaatcattcctggagagcagcatttctacatgaaggcagtgaacgcagctgaaagacagaggtggctggtcgctctggggagctccaaagcatgtttgactgatacaaggactaaaaacgaaaaagaaagaagtgaaaccagtgaatcgctgaaaaccaaaatgtctgaacttcgcctctactgtgacctcttaatgcagcaagttcatacgatacaggaatttgttcaccacgatgagaatcattcatctcctagtgcagagaacatcaatgaagcctcttctctgcttagtgccacgtgtaacacgttcatcacaacgcttgaggaatgtgtgaagatagccaatgccaggtttaaacctgagatgtttcaacggcaccatccggatcccttagtttctcctgtgtcaccttctcctgttcaaatgaggaagcgttctgtcagccaccctggttcttgcaccagggaggagtagccactgtataaaagaaccagtatctgcacttcaccgactctcccagcgacgccgaagaacctactcagatacagattcttgtagtgatattcctcttgaagacccagatagacctgttcactgttcaaaaaatacacttaatggagatttggcatcagcaaccattcctgaagaaagcagacttatggccaaaaaacaatctgaatcagaagatactcttccatccttctcttcctgaagaaactgtagtgtccaactttctctaagtattgctatgcaaaagctgctgtaattgaactattgttatagggagtagttttttcccttaggactctgcactttatagaatattgtaaaacagacaaacaagaaaacaaaccacatacttttgaagcgtgttttatctttatatagtttgtttgcaagagtattttcctaataacttcacagtatgaatgtgcatcttttttttctttttttaacaaatgatggtgtaacattttgacatccataaggacaaatgtagatatttttctaaaaaaccgtgaggggactgacagcttggtcagggtgtattgtagcttataaacatgaaatcttacaaggtttcagtttgacagaagtgtgatatatgtaacttgtgccatggaccaaatggtcactttaccacagctaaaaatgagttatgatagcagcttgatggtgattgcattgtattcctttaatcaaaaaggaaacgcaatattctaagtatctttagcccaaataccatgacatattgagcatctttaaataaccagactgtattgtccttcatatgtgaagttgacactactgatttgtcaataccaaattttgggttaaagtgtttaatttttatttatttattttcttgttgcctcaaaagatgattgcattctaacttttgtgacctaccaaatttaagatgtgtatacattgttctttacgttgttctagaaaagagattttaatgctgtagtgacttagctcacttacatcagagaaataaacaactttcaatggaaaaaaatatatataaaggaaggaagaggatgatattacttctcatatagaaggggttgtacaccccccttgtgatattgttcctaatattcagggagggagaggattatattactcccaatatagcagggagtgtacacccccccccccgtgataatgttcctaatattcagggaagcagaggatgatattactttcaatatcacagggggtgtgctgtccccctgttatattgttcttaatattcaggggggagaggatattattatgcccgatatcacaggagaagtacaccccacaagtgatattgttcctaatatccaggggtaaagaggatgatatcgcaggtggtgtacacccctccccgtgatattgtttctaatataaagaaggagagagcatgatattactcccaatatcgctggaggtctacaccccccttgtgatactgttcctaatatccaggaagggaaacaatgatattgctgtgaatattccagggggtgtacacccctttgtaatattgttcctcatatccagggggtagagaggatgatattactcccaatatcgcagggggtgcacggccccactgtgatattgtttttcatatccaggaggggagaggatgacattactctcaatatggcagggggcgaacaccccctgtgatattgtgctagttaggttgggagaaaatgatattactcccaatatcgcagggggtgtacaccgctcctgtgatattgttcctaatatccatgacgggagaggatattactcccaatatcgcagggggtgtacctctcccctgtgggattgttcacagtatccaaaagggaagaggatgatgttactcccaatatcacagggagtgtacaccaccattgtgatattgttcctaatagccagggaagaaaacgatgatattattgtgaatattacagggggtgtacacaccccctgtgatatggtttttaatatacaggttggaaaaggatgatattactcccaatatcacaaaaggtgtacacacccccccatgatattgttcttaatacttcggtggggagaaaatgatattagtctccatatcacaggggtgtgaactcctccggtgatattgtttttaatatcaagaggggaggagatgatattgctttcaatatcgctgggggtgtacatccctcctgtgatattgttccttatatccaggcgaggggaaaataatattactcccaatagtacacaccccatgtggtattgttcctaatactcagggggaaagaagataatattactttcaatatcacagggtttgtacacctttcctgtggtatagttttcaatatccagggggaaggtacatgatattactcccattgcagcaaggggtgtacacacctcctgtgatattgttcctaatatccagaagtggtgaggatgatattactcccagggggtgtacaccccacctatgatattgtttctaatatccaggggaaaagagtgtgatattatgcccaatatcgcagagggtgtacacttatcctgggatattgtttctagtatttggggagggaggagaggatgctattattctcaatatcgcagaaattgtacacccccgctgtgatattcttcataataatcagggaaaaagaggatgatattactaccaatattgcagggggttacacttcccctttggtagtgttcctaatatccaggaagaaagaggatgatattaatcccattttccaggaagtgtacacccaccgtgtcatgttgttcctaatatccagcagggaagaggatgatattactcccaatatcggagagggtgtacacttcccctgttatattgtttctaatacccagggggaagaaggatgacattactgccaatatcacagggtgtgtaccccaccctgctattgttcctaatattcaaaaggaaagatgaaaatattactcccaatatctcagggtgtgtacacctctcctgtgatatcgttcctaatatccacaggaagagagaatattactctcaatattgcaggggggtgtacacccccctgtgatattgttccaaatattcgggcggggagaggatgatattagtcccaatatcgcagggggtgtgcaccaacctgtgatattgttcctaatatccatgcgggggaggacgatatcactctcaatgtcgcaggaagtgtacacctctcttgttatatttttcttaatatccaggagggaaaagatgatattactgccaatatcgcagggtgtgtccaccccccttttatattgttcctaatatccaatggaaaagaggatgacattgctctccatatcccagaaggtgtacaacgcccctgtaatattgttcctaatattttgggggaagagaggatgatataacttataatatcacaggaggtgtacaccacccctatgtattgttcctaatatcctttaagggagaggatgatattactcccaatatctcaggtggtgcctattccccctgtgatattgtttttaatatccaggggaagagagtatgatattacgcccaatatcgcagggggcatacaccctctctgagatattgttcataatatatagagggagagaggatgatattacttccaatatcagaggtggggtacaccccccggttatattattcttgatatccaggaggggagaggttgatattactggatatatagcagggagtgttcacatcttctgtgatactgttcctaatatccagaaaagtagaggatgatattactcccaatatcgcagaacgtgtacacctccctgtgatattgatcctaacattcaaaggggagaggatgatattactcaaaacatcacagggcatgtacactcccctgtgatattgttcctagtatccagaagggagcaagataatattactttcaatatcgcagggggtgtacacccctctttggtatgtttcctaatatccagaaggaaagagggtgctattactttccatattgcaaggggtgtacacccccctgtggtatggttcataatatccagggagggaaagggtgctattattccccatatcgcgaggcatgtacaccctgctgcggtacggttcctaatatccagggggaaagaggatgctattacttcccatatcgcggggtgtgtacacccccgtgtggtatgttttgtaatctccgggaacgaagagggtgttattacccctcatatcgctggaaatgtacactcccctgtggtacggttcacaatatccaggggattgagggtgctattactccccatatcgcggggggagtgcacctccctgtggtatggttcgaaatatccagggtaagagagggtgctattattccccattttgcaggaggcgtacacccctctatggtatgttttgtaatatcccaggtaaggggtgctattgagagaagagagcaaaagaccccccccatattgttctgtattattttatactcagtacctgttttaagaagaaacaaggaagcgaaaccaaaggcaggcagcccggcgccaggcaccagatccaaaaccagacccgaaaccaggcctgggccttcctgaccttagcctgaaagttaaaattcaacccatgacctagcaactgatgttatccatagattccagacattgtatggaaggacattgtgaaatttcttgttctgttctgtttcactctgagtactggtgcatgcagcccttgtcacatacccactagattgctcaatcaatcatggccctttcatgtaaaaaccttagtgttgtgagcccttaaaaaggacagaaattgtgcactcaacaagcttggattttgatactctagtctgctgatgcttccagctgattaaaagccacttccttcactacctcggtgtctgtgggattttgtccgcggctcctcctgctacactgtgactccccttatagagaggggtgtacacccccctttggttcctaatatccagcgggggagtaggtgctattactccccatattgcggggagtgtacacccccttgtagtacggatcgtaaaatcaaggagggagagaaggtgtaattatccccatatcacagggagtgtacacccctttgtggtatagtttgtaatatccacgacgggagagaatgctattactccccatatcgtggagggtgtacaccgccctgtagtatggttcgtaatatccggaaggggagaggttgctattactccccatatggtgggaagtgtacacccccatgtgatatggttcataatatccaggggggtagaggatgatattacccacaatatcatagaaggtgcacacccttttgtgatattgtccataaaatccagaaggggagaggatgatattacttccaatatcacagggggtgtgtagccccatatgatattgtttgtaatatcaaggtagggagaggatgctattccttacaatagctcaaggggtgtaaccttcttgtgatattgtttgtaatatccagaaggggagaagataatttttttattttaaaagtaaactttaatgtcaaaaatgcaaacttgagaagggcagaaagatcaaacagaaggctgccacttcacaattggagggttgcacagtggccgggcagaggcgctcctcactccccagacggtgaggcagccgggcagaggtgctcctcacttccgagatgttgcaggagccgggcagaggtgctcctcacttcccagaacagggggctgccgggcagaggtgctcctcactgcccagacggtttgcaggcctggcagaggcactcctcacttcccaaacggagcagcggcaagccagaggcgctccacacttcccagatggtggggcagccgggcagaggcgatcctcacttctcagagggtagggcggcccagcagaggcgctcctcacttcccacatggtggggcggcaggctagaggcgatcctcacttcccagacggtggtgtggccatgcagaggtgctcctcacttcccagatggtgtggccgccgagctgaggcactcctcacttccctgacagtggggcggctgggcagaggcgctcctcacttcccagacacttggactccgggcagagactctcctcatttcccagatggtggggctgccgggcagaggcgctcctcacttcccagacggttcagaggccgggcagaggcgctctggggagaggataatgttactcccaatatcgcagggggtgcacactccctgtgatattgttccgaatatccagagggggaaaggatgatatagctcccaaaatcgtggggagtgtacacccccctgtgatcttgtttgtaataccaagaagaaaagagaatgctattatttccaatatagcagggggagtacaaccccctgtgatattgttcgtaatatctagggggagagaaaattatattagtcttaatatctcaggggacgttcatccccctgtaatattgttggtaatattcagaatggagaagatgatattgttcttaaaatacaggaaaaaatatgataatattacttccaatatcgaagggggtgtacactctcctgtgatattgttcccaatatccagaatgaaagaggatgctattactcccaatatcccagggagtgtacacccctttgccatattgttcataatatccaggggaagacaggataacattactcccaatatcaccgggggtgtccacccactagtgatatttattgttcatcatatccagaaaaggagaggatgatattactcccaatattgcaggtggtgtacggtccctgtgatattctttgaaatatctagaaaaggagaggatgatatcactccgagtatcacagggggtgtacacccccctgtgatattgttcgtaatatccaggggagaaaaggatgatataattgccaatatttcaggggatgtgcacctccctgtgatattgtttgtaatatccaggggtggagaggatgatattactcaaaataacgtaaacatcctgtgtgtacatcccctgtgatattgtttataatatccaggggggtagaagatgacattacccccaatatcacagagtgtacacacccctgggatactgttcataatatccaggcgggaaagaatgaactacttccaatatcgcaggatatgtacacccccctgtgatatatttcctaatatttatgtgggtaaggatattacccccaatatcacagaaggtgtacatcctctttgtgatattattcctaacatccaggaaaggagagaatgatattactcccagtatcgcagggggtgtacaccacccctgtgatattgttgctaatatccagggggagaggataatattactcccaaaatcacaggggacgtacactcctcctgagatattgttcctaatattcatggggaaaagaatgctactactccaaatacagcagagggtgtacaccatccccgtgatattgttttttatatccaaagggtgaaaggctgatattactcccaatatcgcagggggtgtacaggccccccatgatatcattcttaatatccagggaggcaaagaatgatgttactcccaatattgcaggctgtatacaccccccgtgatattgttcctaatatccagagtaagagaggatgacattgctcccaatattgcaggggttgcacgcacgccctgtgataatattactcccaatatcaacagtgggtgtacactcctcctgtgatattgtttgttatatctaagaaagaagaggatgatattactgtcaatatcacagaaggtgtacagccccttgtgatgttgtttctaatatccagcggtgagaggatggtattactcgcaatattgtagggggtgtccaacggccctgtgatattgtttctcatattcaaaaaggaaaagaataatataactccaaatatcgcagggtgtgtacacttccctgtgatattgatcctaatatccaggaagagagaggatgatattaatcccaatatcacagggggtgtacatcgcttctgtgatattcttcctaatatccagggggggaggggatgctattactcttaaaatcgcagggaacttacactcccactatgatatttttcctaatatccaggaagggagaaaatgatattactcctaatatcacatatcacaatgggtgtacatctccccgtgatattgtttctaatatcaaggatgggagaaaattatattactctcaatatcgcagggggtgtgcacacctcctgtgatattgttcctagtatccagcggaggagatgatattactttaaatattgtagaaggtgtacaacccccctttgatattgttcctaatatccagggggaaaggagatgatattactcctaatatcgcaggggctgtacaaccctatgtgatattgtttcttctaatatccaggggtggagaagataatattactcctaaaatcgaaggggacatacactccccctgtgatatttttcctaatatccagaaggaaagaggatgatattactcctaatattacaagaaatgtatacctgtcctgtgatattgttcctaatatccagaggggtaaatgattatattactcccaatatcgcaggggtgtacaccttccctgagatattgtttctaatatgcagtggaggagaggatggtattactcccaacatcacaggagatgtaaactccccttgtgatattcttcctaatgttcaggacgaaggagggtaatattactcactgtattgcagcagggggtgtagagccccctgtgatattgtttttaatattcaaggttggagaaaataatattccttccaatatcgcatggggtgtacacccttctttttatatagtttctaatatctggggggagaggatgatattactcccaatatcgcagggggattacacccccactgtgatattgtttttaatatccagggtgggagaggataatattactccaaatatcccagggctatacaccctccgtgtgatattgtttctaatatccagaggaagagaagatgatattactcccaatgtcacagggtgtgtacaggccttctttgatattgttcttaatatccatgagggagaggatgatattactcccaatatcgcaaagactgtacaccctttctgtgatattgcttccaatatccagggagggagaggatattacactcaggatcacagggggtgtacaccccaacctgtgatattgtttctaatatctagggaaaatgagggtgatattactatcaatatcacaggaggtgtacactcccttatgatattgttcctaatatccaggagaatgacaggataatattactcccaatatcgcgggtggtgtctccccccactccgtgatattgttcctaatacccagagggggagagaatcatattactcccaatatcgcaggggatgtacacctacatccggcggagtagaagataatattactcacaatatcgcaagaagtgttcaccttccctgttatattgttgctaatatccagggagtgagaagatgatattactttcaatactgagcgtgtacactacccctgtgatattgtttctcatatccagtagaggagaaaatcatgttactcccaatattgcaggggtgaacacctcctttgtgatatttttcctaatatcaggaaagggagagtatgatattacccttaatattgacaggggtgtacacccccctttgatattgttccaatatccaggggggcagaggataatattattcccaatatcgcagagggtgtacaccccccgtgatattgttcctaatatccagagaaataaaaaatagtattatttccaatatcacagggcgtacattttccctgtaattttgttcctaatatctggggggtggggtggcaggataatattactctcaatattggagagggtgtacacccccctgtgatattgttcctaatattcagggtgggagagaatgatgttactcccaatatctcaggagtcgtatacacccccttgtgatattttttctaatatccaggaggcagaggatgatattgctcccaatatcgcagggggtatacacccgagctgtgatattgtttctaatatgcaatatgggggaaggatgattttactttcaatatcgcagggaatgtacactttccttgtgattttgttcctaatatccaggggtggagaagatgctattactatattactcctcatatcgcaggcggtgtacaactccctgtgatatggttcagaatatccagagtgaaaaaggagggtgacattactcccaatatcgggggggtgtacacccctttgtgatgtggttggtaatatccaggggggcagatgagggtgatatcactccccatatcgtggaaggcgtccacttttttgtgatgtggttctttatatcccgaggggagaaggtgatattactccccatatcgcgaagggcatacacccccctgtgatatagctcataatattccggagagtggaggaagatactatgccctatatcgcgggtggcctacaaccccctatggtttggcttataatatccaggggggagagggtaatattgctccccatattgtggagacgtacagccccctgtgatatggtttgtaatatctttggggggcgagggtgatattactccccatatcgcggggagcatacacccccgtgatctggttcatagtatctcaaaggaagaagttgatgtgtacaacttaagggaaaaagttgaagtgaagtgtacacacgccctgtgacgtggttcataatatccaggcgggggagaggagagtgatatttactccccatatcgcgggtgttgtaaactcccctgtgatatagttcataatatccaggggagagaggagggtgatattgctcctcatatcgcgaagggtgtacaaccccctgtgatatggttcataatatccagaagggtagaggacgatgatattactccacatatcttgggaggtgtgatatggttcgtaatatccagcgatgagagaatgatattactccccatatcgcaaaaggtgtgatagggtttgtaatatcctgagggggagagggtgatattaatccctatattgcagaaggactacaccctcccatgacatggtttgtaatatcccagggggtagagtgtgatattactttccatatcacagggggtgtgatatgattcgtaatattcgaagggggagagggtgacactactctccatatcacggggtgtgtgatatggttcttaatatcccaggggttagaggttgatattaccccctttttggggggtgtgtacaccccctgtgatatggttcgtaatatcccgggggagacagggtgacattattccccatatcgaggggatcgtacaccccctgtggtgtggttcataatatccctagggggagatggtgatattactccccatatcagggggcgtgcactcttctgtggtataattagtaatatccagggggcagaggtcgatattcgtttccatatcatgaagggagtacacttccctgtgatatggttcctaatatccaggggggagagggtgatattattccccatattgcggggggacatacaacccctgtgatatggttcataataaccagaaaagaagagggtgatattaatccccgtattgcagagggcatacaccccccctgtgatatggtttgtaatatctaggggaggaaaaggtgatattactttccatattgctgggtgcagacacccctttatgatatggttcataatatccaagttggagagggtgatattacttcccatatcatgggaggtatacccttccctgtgatatggttcgtaatatccagaaggggagagattgatattactccccatattgtggggggcgtacaccttcctgtgatacggtttgtaatatctaggggatatagtgggtgatattactcaccatatcacgggggttgtaacatggtttgtaatatccaggggaggagagggtaatgttactccccatatctcggggcatgtacaccctcctgtgacatggttcgtaatatccaggtcgggagagggtgatattactcctcatattgccgggggtgtgttatggttcataatatcctggggaaggaggctgctatcactctccacatcttgggggatgtacactctcctgtgatatggttcataatatccagggtgggtgagggtaatattactccccatatcgcgggaagtgtacatacccctgtaatattgtttgtaatagaagagagggtgatattactccccacatcgcgggtggtgcccacccccctgtgatatggtttggaatatccagggggatgaggagggtgatattactccccatatctcggtgggagtacatccctctttgatcaagttcataatatccaaaaggaaacaggagagtgatattactccccatatcgccgggggtgtacacgggagggggagtacacccccggcgatatggtctgtaatatccagggaaggagaggagggtgatattactcaccatatcgcaggtggtctacatttacctgtgaaacagtttgtaatatccagggggggaaatgagaatgattttttttttttgagtctcactgtgtcacccaggttggagtgcagtggcacgatcttggctcactgcaacccccgcctcctggactcaagcaattctcctctcccagcctcctgaatagctgggactacaggcgcaccccacaacgtctggctaatttttgtatttttattagagacggggtttcaccatattggccaggctgatctcgaactcctgaccctgtgatccatccgcctcggcctccaaaagtgctgagattacagatgtgagccaccacgcatggcccaaggagaacgatattactccccatatcccagggggtgtatatccccctgtgatatggttcagaatatccggaaggaaagacagggatattacttcccatatcgcaaggggtgtgacatggttcgtaatatcccatgggggagagggtaatattactcttcgtattgtgaagggcatacactcccctgtgatacagttcataatattccggggagtagaggaagatattatgctccatatcgcgggtggcataagccccctgtggtttggttcataatatccagggaggagagggtaatattactccccatattgtggggacgtacaccctcctgtgatatggtttgtaatatcccagaggggagagagtgatattactccccatattgcagggacatacacccccctgtgatatggttcaaaatgtcttttttttttgaaggactggttctttatttcaaaaagacacttgtcaatattcattatcaaaacagttgcactattgatttctctttctcccaatcggccccaagtagaccacatcaaaggagagtacatattaagccaataagctgtaggatgtacacctaacagacctcctagaaaccttaccagaaaatggggacagggtagggaaagaaactttaaaagatcaacaaactgccagcccacggactgcaggggctgtcacagccagatggggtggccagggtgccacaaacccaaagaagcaaagtttcaaaataatataaaatttaaaaagttttgtacataagctattcaagatttctccagcactgactgatacaaagcacaatgagatggcacttgtagagacagcagcttcaaactcagaaaagggtaatgagatgagtttcacatggctaaatcagtggcaaaaacacaatcttctttctttctttctttctttcaaggaggcaagaaaagcaattaagtgctcacctcaacataaggggaacatgatccattctgtaagcagttgggagggggtagagatggaacaaaattttggtctcagaggtcttgccatcttaatttggtcacttctaatgaaaaaaataaaaaatagaaataacattatccaaaggtatcttaaagctgaaaacttgaacagcacattttttgttgttgttgtttggctaactcctcctggaaccacctttctggcttagctagtactttgtacagagcaatgaggcttcccatagtggagtctccctgggctctgtttggctctcagcaaggcaggcctataccttttcctctcctccatggagagaggaatatgcattaaggtgaaaaatcaccttccaaaagtgagaaagggattcgatcgctgcttcagggctgtggtattatatggaatgttttacaaaaggttgctacaaaacaacaaaagaggtaattacaaaatgtgtacatcacaacatactttttaaagacattatgcattgtgctcacattcccttaaatgttgtttccaaaggtgctcagcctctagcccagctggaatctccgggaagaggcggacagtttggtgaaaaagacacagggaaggagcgggcggcggaaggagggggcggcgaaaggagaaagcagccttccagttaaagatcagccctcaattaaaggtcagcttcgggcaggctggcctcaggcggagtctggttcagagggaggagcagcagcagggtgagactgaggcgttctacatctcattcaggtcaagcagagtctggtccagcatcctttgtgtacagaggtgctcccctttggtgcatttcagtttatcttccaagtcatcaattgtcttttccagcttggctaccgatctctcagcaaactcagcatgggtctccgcctcctttattttatcagtaagaatcttgatctcttcctcatatttgtcttctttttgagagtacttttcttcagcagcactcagacacttcaggttctggtccatcagtctaatctgctcatccatctctcggcaaagggattctgccagctcagctcgttcctctgtgcgttccaagtctccttcaatgatcaccaacttacgagccacctcttcatacttcctatctgcctcttctgcaatgtgcttagcttctctgagttggatttcctggagttccatcttttcttcatcttttaaggcccggttttcaataaccttcttacctctctcactctcatcagcagctttttccgcttcttccagcttttgcagggcagtagccaggtgctcctgagcacggtccagctcctcttcaaccagctggatcccacgttcaaggaggccacctcagcctcagcctgttcccgggcccacctttctccctcaacttctcgctggaggcgctcagctcgctcctctgcatcatctgcctgctgctgcagaacctggatcttgcgcttcaccgcctcgatggtggtgatcccagccatggtgcccacccagctactgctagagctccggttcctgcctcctccgatcggcgttgcagcctcctctcacccttacttccgcctcggttcaaaatatcttaagggaaggagttgatattactccccacatcacgggaagtttacatcccctggtgatatggtttgtaatatcccagggtggatagggtgatattactctccatatcgcgaaggagtactcccccctgtgatatggttcataatatccttggggggagagtgtgatattactccccatatcgcgagggccatatactcctttgtgacatggttcgaaatatcccggtgggggagggggtagagggtaatattactccccatacagcgaagagcatacgcccttctgtggcaaggttagtaatacttcagggaaaagagtgcaatattacttttcatattgcagggaacatacactcccctgtgacatggttcgtaatatcccgggggctgagagggtgatatttctccccatatcaccgggggcctacacctgggtgtgatatggctcataatatacagggagggagagggtgatattactccacataccgagtgaggggttacacaccctcgtgacatgttcgaaataccccaaggaggagacaatgatattactttccctgtcgcgggggctacaccctcccagtgatatggttcacaatatcccggggtggagagggtgatattactccctatatcaccggggggtgtacacttccctgggaaatggtttacagtatccccggggggagagggtactattactccccatatcacgttacatatcagggtacacccccacgtgatatggtttgtaacatcccaggaggaagaaaatgatattactccccatatcgcggtggcatacacccctccccgttaaatggttcataatatcttggggtggagagggtgatattactccccatatcacgtggggcatacaccccactatgatatggttcataatatcccggaggggagagggagatattactctccatgtcgcggggggcatatacacccctgtgatatggtttgtgatatcccgggggcggagagggagatattactctccatatcgtggggtcgtacacttttctgtgatatgattcgtaatatccagacggggagagggtgatattacttcccatattgcgggggcgtacacccctctgtgatatggttcataatatcccgaagaaaagagggtgatattactcctcatatcgcggggaacacacaccaccctgtgatatggtttgtaatattcagcgggggagagagtaatattactccctgtatctcggatggcgtacactcccctgtgatatggttcataatatccagaagaaaagagggtgatattactccccatattccagggaatgtacaccaccctttgaatatggttcgtaatatccaggaggggagagggtaatattgctcccaatatcgaaggaggtgttatacggttagtaatatccagagaaggagagggtgacattactccccacatcgtggtgggtgtgcacccacctgtgatatggttcataatattcaggttaagagaggtgatattgctttccatatcgccaagggtgtacactcccgtgaaatacagttcgtaatatccaaaaggggagagggtgatattactcccatatcgtggggggtgtacacccctctgtgatatggttcataatatccagggtggaataaggtggtattactccctgtatctcggggcatgtacatcgcctgtgatatgattcataatatccagaagaagagagggtgatattaatctccatattgctgggggtgtacaaccccctgttgtatggtttgttacactgagttggggagagggttacattactctcaatatcgagtggggcatacacacttatgtgatatggttcataatatcccagggaggagagggtgatattactccccatatcgcgggaggcatacaccccaatgtgatatggtttgtaatatctacatttttttttttgagacgaagtctcgctcttgtcccccaggctggagtatgatggccggatctcggctcactgcaacctcagcctcccgggttcaagcgattctcctgccttggtcccccaagaagttgggattacaggcgcacaccaccacgcccggctactttttgtatttttagtagagaaggggtttcaccatgttggccaggctggtctagaactcctgacctcagatgatccacctgcctcggcctcccaaagtgctgggattacaggcgtgagccactgcacctggcctggtttgtaatatctatgaagggggaaggtgatattactttccatatcacgggaggcgtacaccacgatgtgatatggtttgtaatatccagggggtatactgggtgatattactccccatatcgcggggagtgtatacccttttgtgatatggttcctaatattaagctgaggagaaggtaatattactccccatatcgcaggggtttttatatggttcataatattcaggaagagagagggtgacattactctccatatcacggggtgtgtactcccccatgtgatatggtttgtaatatccagggaaggagaggttaatattactccccatatcgcagggggtgtacacctctctgtggtttgtaatatccaaagggaagaggatgatattatcttcaatatcttggggggatacagtccccagtgatattgttcataatatccagagggggaggggatgatattactcccaatattgcaggtggtgtacaaccccctgtgatattctttataatatagagggggatgatgatattactcccaatatagtaaacaacctgtgtgtacaccccctgtgatattgtttataatatccaagggtggaaaggatgatattactcctcatatcgcagggggtgtatacccctctgtgacattgttcctaatattcaggggaggagaagatgatactactcctcatatcacaggggatgtacacccccctgtgatacttttggtaatatccaggggaggagaaaattatattattccccatgtcacagagggtgtacaccccgctgtgatagtgttcataatatccaggtgaaaagaggatgatattactccgaatatctcaggaagtgtacacccttctgtgatattgttcataatatccaaaggtggagaggaggatactactccccatatcgcagtgggtgtacacccccctgtgatatggttcataatatccaatgtaggagaggatgatattactttccatatcgcggagagtgtacatccccctgttatattgtttgtaatattcagggagaaagaggatactactactccccatatcacacggggtgtatattcccctgtgatatggttcctgatatccaagagatattataatcctctcttggattatgctacctctcatatcgcatggggtgtacacacactttgtgatatcgtttgtcatatccaaggagggagaggattatattaatcccaagatcacggggggtgtacaccctcctgtgatattgtttgtaatattaaggggggagaggataatattactcccaatataattaacaccctgtgtgtactcctccttgtaatattgttcataatatccaatgggggagacgatgatattactttcaatatcgcagaggatgtacatccctttgtaacaatgtttgtaatataaaaggcaagagaggatgatactacttccaaaattgcaggacatgtacaccccccggtgatattgttcctaatatccagtggggaagaggatgatagtagtcccaatatcgcaaagggtgtacacaccccctgggatattgttcctaatataaaaggaggagaggatgctattattcccaatatcacagaaggtgtaaaatcccctgtgatattgttcgtaatattcaggaggggagaggattatattactcccaatatcacagggtgtgtacacagggaggggcaagggccagaagcgggcgggaatccccatgtttgggcggacccagtttctaatggccagcatttgccaatcaaagcttaccagagaactctaaaagccagggctttcctgctagacaagactcatttctggaactgctttaaaaagaaacaaaacttcccaaggaccccttttcctctctgtctgcctaaaataatgttttaaaaactcctaaagcagctgaattcagcccccttcctgggggaatgtatagacggaactcccacctttcccggcatcccaaggccagagtatgtgaaactcctgggtctctatgtgtgtctgagcggctgctctgccaacactccacacagccctgtgtcctggacccaaggcccttatgacctgagctcaagaggggatctcctgatccatgggttgcaaagatccatgggagaagcatggtttctggggcggggtcacacgctcagtcactgtttccctcggatgccggagatggttcctttggctctctgccaatacagggtgaatcatcatccatccctcttttctttgttctcccgggtcaagttgtttgcctagtcagtcccaatgtgagaacctgaatatttcagttgacgcgctgacttcaaaatccccgggcttcgggaggcggagcttgcagtgagccgagatcccgccactgcactccagcctgggcgacagagcgagactccgtctcaaaaaaaaaaaaaaaaaaaaaaaaaaaaaagtccccgggcttttcttttcactcagtggaaggcagctgcttctaattggccatcttggcccgcccccaccacgtgaccttctgtaaaatgcctccactctccaggaacgctctcattatataactttgcctgaaaccaacagcacgctcattgcacatatcatgggctcatttatttcacttataaagaacctggccaaggaagagatagtgcctaaagtggccagtattctgaccgatatgttagaaaaatggtgtgccgaccaattcatgacatgtgtcccaaaactagcaacggaaattgtattcgccgtgttgaggtctctaatccagatgatgctcatctatgtactggaaaaggcagagtcctttcctgacaagctgctgaaactcttcagaaacatctcatatttcctgaagaagatgatgtctggacaagcagcacaggtcgttcagatttaactttctattcatatatccagcacgatattcgcacaattgtcacgaaaccttaccagttgatgagtcctgcacatttcctttaatttcaggaggaagagggtaatccggatgagttttctgacctactctgctgctgtgattaaacaaccaccaggaaattttgacgacactgttctcctgagctcctccctttcctccgggaacaaaacaattgaatttacaaaaataaagtgttatttgactggagtgaggtctcatgtctgcttatgcggtggctcgctgctcagaacagggtgagtctctgggttgtgtgctgaggaggggaggctctcaatctggagaaaacccactgcaggggacacctccatggggtctgagggactgaggatgaggagccggactgggtctagggaaggaggaggtttcagagggtgaaattctggcactaaagcctgggggtgtttgggaacttcctccttccgaagaagtttcagggagggataaagacaaaccctgggctccttgaggggcccttactaatttgagaggactctatcgggaaggagagtgacaatggcctccttgaggactgaggcccctgaataaatgaggcccagatacagtccatgggggatgagaccttcaagggtcacattttggttgggacagaggaaaagtgcagctctgcagccgcagaggaaaacccggcagtgtgaaagcgaccttggaggggccctgtgcgctctgaatgcgtctgagcccccatcccctgtccccgcctctctttctggattcttccagctcggctgtctccgccatcttctgagcgctccaccctgacttattcaagtttcccttctgccttccaagtactccaaaatctttcagatctgtgtccctacccctgtttttagcatgtgttggggctccaggtccctgaaggtttctggcctgaaatccacctccccagcggagtggactgcgttctagagactccacactccgcgaggttcccaggcccctgagggacaaccgagtggcctgcgcacttcagggctccacactcggcaaggtctttcaagcccttggggtccccttcttagttttttccacctttctgggctgcagtcactccataaatgctgggatctgatccccacccccactctcgtttcctcaattctgcgggctacacgctctggcaaggtcctccgggccctggatcccctccctctccctatgcccacgctcctagtcagcccttctggggtccactattttcaggaactaaccgttctcatggagccttgctaaccggaaagctgtgtggaagaaaggctttgaggatagaggtggagatttggctcttccatagtgccactcacccaccccaccatgctgccactgccagacccggacccctgtttcagaacaagtgaccagattcgctcctggacagccctggacactggccttttctctgaaaactactcaccctttctctagtccccacttcatgccagcctcataccctcttccttcccccacgctggcttccgggatcctcctctgctcagacaacctcttctgtgtcccacccccgtttttagaatgctttggggcaccaggttgggggaaggtttctggcctgatatccatctctttccaaactcccttcttcccttgaaaggcttcttgccttcagccccacttctggctccgaggtttcaggacaccctcctcttcatcctcattcttttgaccaccagctttttaggaattcgaacgtccctctcatcttcgtgaatcctgtccaggcatttgttgaccccttcatctgatacccctgacctcacattgccaaaagtctacccctacccagtacactggaattagacaaaatcccaggagttttacctcaactctgagtgtgcccacaggagctctccctgaagccacgtccttttaagcagggtctagggttcctcccttgtcttaatgaactctttgtcacacggaggacgttatggagcccttatgatctttcactgcctttctgcccagcgttttgtctttccatggacatttataatattttccatggacattttgttctctcaatgtccacccctaatttccaacatcccaaagattctcatgtgtttcctgaaagccatttacaggaatggctgtgcccagacccccttccccaggatcctccttcacacctggtaggtgcctctcctagagagatttgcactcagttgtcgtgcagtcacatggcccagatggttgttaatcacccccttcctggcaacagctagcagccagggaatcactggcacagaaacctcagggtgaccaagatgaggccacctctgtgctgaaggctgtgctccagagcctgcttgggatcaggcttaagcaggtcttcagccagacctgatgttacctggtttccttgagctgccctgcctgagctatcgggagcactccctcaatgcacatcttgattccctatctcatgctctgcttctagaaaccatgagctatcaattgctactggcaatggtcctgggaagtcaaccctaagtatggattctggggttggatgactccccacaggacttcagtgagcaacaatcactgctggcagttggaggacagagtcgctagggcatgtgaccactgtgaaaccaccgatgtttcacctggggtaattttggatgaactacggtagaagcactgaaggtacattgcttttggtttggaagattgtaggtaaataatagcgatatgaatgtggaattggatggctgcaaacgagtgccattgatgcattgaaagaggaaaagtcaggctgtcacctgtcactcagcaatttaaagtgtgagagttgggactagatgtggtggctcacatctataatccagagattcgggggaagcttgaagaggtaggatcttttgagtccaggagttccagaccagcctggacaccagagcaagacctcatctctacaacaaaattttcttaaaaattagatgggcttggtggcacgcacctgtacttgtagatctagctaatggggagcatgagataaaaaaatcacctgagtcagggacttaggggttacaatgaggtatgattgtgccagtgcacacactcccacctggccaacagagtgagattctgcttccaaaaaaataagaaataaatcaggtttgagagttggaaagcatcatcttctcctagagccaaaggacatgtacaactgagacccaggaacaaagcttcatcacaaagagaccatcatcagtggagccgggagatgcattccccctcaccctgccttgaggaggcagtggagtcatctgtctgggatcctttctgacccagccctatttgtttgtctctttggcttctttggatttgtatattttagctgttataacactgtaaaacaaacagagtgatttttttgagttgtgtgaatgatgctagctccatagtcaccctgagagtgatgggaacttttgaatttgtggcaagttggagggtagtgtaagtgacctgagattgccaaattggggctagcactggatgtgaggttaggctagtggaaaaatatgcccagaaccagaggagtgtgggctcactgcaggtggttaggctcagatccaaattgtacagatggatagctttggggtaaagaataacatagttgagaagtgcatgtgttagtctgttcatgcactgctataaagaattacctgagactgggtaattatttataaaactcaggtttaattgggtcatggttccacaggctgtacaaaaagtatgatgctggccatcagctcaacttctggggaggccccagaatagttagagtcatggcaaaaagtacaagggaagcaggctcatcttccacggccagagctggagcaagtggtaggagaggtgatacacactttcaaacaagtaggtcttttgagaactccatcaccggacagcacctatgggatggtgctaaattattcatgaaatatccgcctccataatccactcaactgtcaccagcgcagccagccccacctccaacagtggggattacaattccatatgaggtgtgggtggggacacagctccaacctcaatcagtgggcatcctggattgggtctactatagaaggagaaccaggagctgactatgatcttgaaccctacccatgatggccgggcggggtgactcatgcctgtaaccccagcactttgggaggctgaggtgggtggatcgcctgaagtcaggagttagagaccagcctggccaacatggtgaaaacctgtctctactaaaaatacaaaaaattagaccggcgttgtgctggatgcctgtaatcacaccactacgctccagcatgggaaaaaataccaaaacttcgtctcaaaaaaaaaaaaaaaaaaaaaaaaaaaaagactgcccatgaccactgcaccagtgagagggacaccagcatcactgagatgcaagggctggacattcttcataggtcagagctcaaagcaggggacactgatacagagatgggctccatccatagcaccaaagtggtgagaggatgtgggaatggcagaggccagcactttgccatcaatgcaagggggtataaggaggtgacaccagtgccagagtacatcacggggggactgccctacaatatctaggacttacctcttagagcgtgtttcattagcgacaacagatataaatggcagacaggtgtgtccctgcattaacaggaaatagaaatcatcaagaggaacagaaggcagatgtcagcagccccttagaaagtcatcatccttcatacagttaaaatctgagacagttctcacacgagaaggcctaactcaaaaagaggctgggttctcatgaggcaggtttatgcaaaaccaaggaaggtgtacaagtttggaattctccagtttcccttggaaaagacctacagtcatttgcttaggtaactgagcactgaacaaaggtgagtattgttgtcttttagaagctcttggccaagaaggccttgttggcataaaacccatggtttggaaacatcaccatgacccctgttagagtaatggcctaagggtgggggtcaggaaattgatgtattccttgccaacttctgcctctaagtgagtgaactctgtttgtgaacctctctcctctgtggttatgttcctaggctctcatgtataatcaggagtcatagacttagaaacaggaaaaatacttacagtgtttttgtggcctgtgagctatgacttataattttaggaaaaaaacaattgcaaatggaaagcctaagtctatcaatgctcatccaagacaacataatcaataaaaaccaatatcaaatctcaaggcaaattatttcctgtatatagatggcagagatgagcaccaccatcaaaaactcaaggaccagtgctgtgggtccagtcatctgtttcatggaattcaccagtctggtatcttcaaaatccagaaggatgatggcagatggcaggaaagtaatgcaaacgtcatcaggtgtgaccccactgtagcagctgtgatggatgttttctctcaccatagcaataaataacacaacctcggtcacactgtatgcattgttggtctgcaaaatccatgttttgcaaaactcttcaggaaggtggatctgtaatattggcattgacatgagaacaacagcagtatttattcacaatctcaagctctctgtcttcccgtctctctcattagccatccaagtagtcctgaggaaccaagcccatcagaacattctgcaacataatacacagctccattctccattcaaattttgttgttgttgttgttgttgatgagacaacatcttactccatcagccaggctgacgtacagtggggctatctgggctgactgtagtcttgagcttccaggctcaaggcatcctctcacctcagcctcctaagtggcttgaactacagacacacagcgacatgctgggctagtttttgtatattttgtagagacgtgctctcaccatgttattcaggctggactcaaactcctgagcgtaagtgatccaagcaccttggcctcaaagtgctgagattacaagcctgagccactgcacccagcccaatctccattctactgataacaatgtcattaccaggtctgatggacaggaaatggtaaggtttctgaaaacctaaggatcacacagcgagttccaaaggctgaaagtgcatacctgtcgacactgataccaatgacatccaatggtgagaatgacattccttgtagtcctagctctgctcataacaaatctatactgaagtgtaagagtttgatggtcatggggattttccatgtctctgcctttcagcgatgtgccatatctgtgaagtgttcagaaatgcaacagcctgaggcatgctgggcatatcctctaataaaaaggaaaatgccattttatggtcctgtatttctacaagttggaacacatgggcctgtgatccagatgggggaaatgggaatattcccactcattcaccttcatccacgaagcccatttgaaagctttgggcttcccatccttgtagattttagtgttgtgggctgggtgcagtggctttcacctgtactgccaacactttgggaggcctagacaggtgaatccactgaggccaaaagttcgagaccagcctggccaagatggtgaaaccccgtccctactaaaaatacaaaaattagcaaggtattggggccagcacctgtaatcccagctgctcgggaggctgaggctggagaatcgcttgaacccaaaaggcagagactgcagtgacccgatcctgcctttgcactccacctgggcaagcagaacaaaacttctgtcttgaaaaaaaaaacaaaaaacgaacaaaaaagatgttagagttctgggtttagaggtctataccccagaaagagaatggtttcaacaagggacaaagaagttgctttaaacgttgacttgccatttcttttcagtgtgtttgttctcttgcgtcaagagaccaccagaaaagtggtgcaattactctcctgtcaagaatcattgactatcatctgcaagagggtcagatcctggtatataattagggcagaaatacttagtctgagaagggtatgacatccagaggccctattaatgatgtccttttctccatgcctgactctgaccccatgtgctggactgcccctgtgtggatggcctcatggcctgctcggactctgaggtcccaccccaagtggcacctccatggagggctctactcttgtatgggctctgacactcacactgagacactctcccatggacacctcttcacccacttggggtctgaaactgggctactccatccctccctaacctggaacagagagctttcactgctattacacaagtcatagaggctaactcctcatttttccaagctaattattgaaacattagtcctgggttgataagacaagataagttaacttttcataaatttgcttatcaagttttgaataaattcaaataaattcaccttccccacacaccttagttgtcgacatcacacgcgcacccatactcacagggtgagcacgaaggcttcactgtcagtggagaaagtggcaaaacccttctgtgcctcatcctggtctagacctggccctcatcctttcccactcttcccctcactcccttggattcatccacactggcctcctgcctgctgctccacctccctgcgaagctcacccctgcctcagggcctttgcacgtgcagtggcttcaagccatatcctcttcacccagatctcccagatctcctgaatgatcttcttttatcattcaggtctcagcttgcatgtaatcttctcagtgaggattacccaaaccacatagttcattcattcattcaaatattcattcaatggcatattgacaaagcagctacttcatgccaggccttgggccaggtgttatggatatggcaacaaacaaaacaagagttttctgctctcaaatttttacccacttaaaggagatatcatacatcatctgtaaataaatacatcatctgtaaataatgatgtaaataaatacatcatctgtaaatctgtaaataatgatgtaaataaatacatcatctgtaaataaataaagtataataaaagaaaatagtaggtttttttggttggaggtgaccgtgaagtttgcaaataccatcttacaacacattattttattttatttcatttcatttttaattttattattattatactttaagttttagggtacatgtgcacaacgtgcagatttgttacatatgtatacatgtgtgaagttggtgtgctgcacccattaactcgtcatttagcattaggtatatctcctaatgctatccttcccccctcccccaccccacaacagtccccggtgtgtgatgttccccttcctgtgtccatgtgttctcattgttcagttcccccctatgagtgagaacatgcggtatttggttttttgtccttgtgatagtttgctgagaatgatggtttccagcttcatccatgtccctacaaaggacacgaactcatcattttttatggctgcatagtattccatggtgtatatgtgccacattttcttcatccagtctatcattgttggatatttgggttggttccaagtctttgctattgtgaagagtgccgcaataaacatacgtgtgcgtgtgtctttatagcagcatgatttataatcctttgggtatatacccagtaatgggatggctgggtcaaatggtatttctagctctagatcactgaggaatcgccacactgacttccacagtggttgaactagtttacagtcccaccaacagtgtaaaagtgttcctatttctccacatcctctccagcacctgttgtttcctgactttttaatgatcgccattctaactggtgtgagatggtatctcactgtggctttgatttgcatttctctgatggccagtgatgatgagcatttcttcatgtgttttttggctgcataaatgtcttcttttgagaaatgtctgttcatatccttcacccactttttgatggggttgtttgtttttttcttgtaaatttgtttgagttcattgtagattctggatattagccctttgtcagatgagtaggttgtgaaaattttctcccattctgcaggttacctgttcactctgatggtagtttcttttgctgtgcagaagctctttagtttaattagatcccatttgtcaattttggcttttgttgccattgcttttggtgttttagacatgaagtccttgcccgtgcctatgacctgaatggaaatgcctgggttttcttctagggtttttatggtttgaggtctaacatgtaagtctttaatccatcttgaattaatttttgtataaggtgtaaggaagggatccagtttcacctttctacatatggctagcctgttttcccagaaccatttattaaatagggaatcctttccccacttcttgtttttgtcaggtgtgtcaaagatcagatagttgtagatatgtgacattatttctgaggactctgttctgttgcattggtctatatctctgttttggtaccagtaccatgctgttttggttactgtagccttgtagtatagtttgaagtcaggtagcatgatgcctccagctttgctcttttggcttaggattgactttgcaatgcggggtcttttttggttccatgtgaactttaaagtagttttttccaattctgtgaagaaagtcattggtagcttgatggggatggcattgaatctataaattaccttgggcagtatggccattttcacgatattgattcttcctacccatgagcatggaatgttcttccatttgtttgtatcctcttttatttcattgagcagtggttttagttctccttgaagaggtccttcacatcccttgtaagttgggttcctaggtattttattccctttgaagcaattgtgaatgggagttcactcatgatttggctctctgtttgtctgttattggtgtataagaatgcttgtgatttttgtacattgattttgtatcctgagactttgctgaagttgcttatcagcttaaggagattttgggctgagacaatgggttttctagatatacaatcatgtcgtctgcaaacagggacaatttgacttcctcttttcctaattgaataccctttatttccttctcctgcctaattgccctggccagaacttccaacactatgttgaataggagtggtgagagagggcatccctgtcttgtgccagttttcaaagggaatgcttccagtttttgcccattcagtatgatattggctgtgggtttgtcatagatagctcttattattttgagatatgtcccatcaatacctaattattgagagttttcagcatgaagggttgttgaattttgtcaaaggccttttctgcatctattgagataatcatgtggtttttgtctttgggtctgtttatatgctggattacatttattgatttgcatatattgaaccagccttgcatcccagggatgaagcccacttgatcatggtggataagctttttgatgtgctgctggattcggtttgccagtattttactgaggacttttgcatcaatgttcatcaaggatattggtctaaaattctcttttttggttgtgtctctgcctggctttggtatcaggatgatgctggcctcataaaatgagttagggaggattccctctttttctattgattggaatagtttcaggaggaatggtaccagttcctccttgtacctctggtagaattgggctgtgaatccatctggtcctggactgtttttggttggtaagctattgattattgccacaatttcagatcctgttattgctctattcagagattcaacttcttcctggtttagtcttgggaaggtgtatgtgtccaggaatttatccatttcttctagattttctagtttatttgcgtagaggtgtttgtagtattctctgatggtagtttgtatttctgtgggatcagtggtgatatcacctttatcattttttattgcatctatttgattcttctctctttttttctttattagtcttgctaccggtctatcaattttgttgatccttttaaaaaaccagctcctggattcattaattttttgaagggttttttgtgtctctatttccttcagttctgctctgattttagttatttcttgccttctgctagcttttgaatgtgtttgctcttgcttttctagttcttttaattgtgatgttagggtgtcaattttggatctttcctgctttctcttgtgggcatttagtgttataaatttccctctacacactgctttgaatgtgtcccagagattgtggtatgttgtgtcttttttctcgttggtttcaaagaacatctttatttctgccttcattttgttatgtacccagtagtcattcaggagcaggttgttcagtttccatgtagttgagcggttttgagtgagtttcttaatcctgagttctagtttgattgcactgtggtctgagagacagtttgttataatttctgttcttttacatttgctgaggagagctttacttccaagtatgtggtcaattttggaataggtgtggtgtgatgctgaaaaaaatgtatattctgttgatttggggtggagagttctgtagatgtctattaggtccgcttggtgcagagctgagttcaaatcctgggtatccttgttaactttctgtctcattgatctgtctaatgttgacagtggggtgttaaagtctcccattattattgtgtgggagtctaagtctctttgtaggtcactcaggacttgctttatgaatctgggtgctcctgtattgggtgcatatatatttaggatagttagctcttcttgttgaattgatccctttaccattatgtaatggccttttttgtctcttacgatatttgttggtttaaagcctgttttatcagagactaggattgcaacacctgcctttttttgttttccattttcttggtagatcttcctccatccctttattttgagcttatgtgtgtctctgcacgtgagatgggtttcctgaatacagcacactgatgggtcttgactctttatccaatttgccagtctgtgtcttttaattggagcatttagcccatttacatttaaggttaatattgttatgtgtgaatttgatcctgtcgttatgatgttagctggttattttgctcattggttgatgcggtttcttcctagccttgatggtctttacaatttggcatgtttttgcagtggctggtactgactgttcctttccatgtttagcgcttccttcaggagctcttttagggcaggtctggtggtgacaaaatccctcagcatttgcttgtctgtaaaggattttatttctccttcacttatgaagcttagtttggctggatatgaaattctgggttgaaaattcttttctttaagaatgttgaatattggcccccactgtcttctggcttctagagtttctgccaagagatcagccgttagtctgatgggcttccctttgtgggtaacccgacctttctctctggctgcccttaacattttttccttcatttcaactttggtgaatctgacaattatgtgtcttggagttgctcttcttgaggagtatctttgtggcattctctgtatttcctgaatttgaatgttggcctgccttgctaggttgcagaagttctcctgggtaatatcctgaagagtgttttccagcttggttccattctccccatcactttcaggtacactaatcaaacgtagatttaatcttttcacatagttccatatttcttggaggctttgtttgtttctttttactctctttcctctaaacttctcttctcacttcatttcattaatttgatcttcattcacttatatactttcttccacttcatcaaatcggctactgaaggtattgcatgcatcatgtagttctcatgccatggttttcagctctatcaggtcatttaaggtcttctgtacattgttttctctacttagccattcgtctaatcttttttcaaggtttttagcttccttgtgatgggtttgaacatcccctttagctcagagatgtttgttattactgaccttctgaagcctgcttctgtcaacttgtcaaagtcattctccatccagctttgttccattgctggtgaggagctgcgatcctttggaggagaagaggtgctctggtttatagaattttcagcttttctgctctggtttctccccatctttgtggttttatctacctttggtctttgataatggtgacctagagatggggttttggtgtggatgtcctttttgttgatgttgatgctgttcctttctgtttgttagttttccttcgaacagtcaggttcctcagctgcaggtctgttggagtttgccggaggtccactccagaccctgtttgcctgggtatcaccagcggaggctgcagaatagcaaatattgcacaacagcaaatattgctgcctgatccttcctctggaagcttcgtctcaaaggggtgcctggctgtatgaggtgtcagttggcccctactgggaggtgtctcccagttaggctagatgggggttagggacccacttgagaaggcagcctgtccattcacagagctcaaacactatgctaggagagccactgctctcttcagtgctgtcagatggggatgtttaagtctgcagaaatttctgctgccttttattcagctatgccctgcccctacagatggagtctacagaggcaggcaggcctcattgagctgcggtgggctcctcccagttcgagcttccagaccactttgtttacctactgaagcctcagaaatggtgaacacccctcccccacccagtctgccgccttgcagttccatctcagactgctgtgctagcagtgagcgaggctccatgggcgtgggacccactgagccaggcacaggatataatctcctggtgtgccatttgctaagaccattggaaaagcacagtattaaggtgggagtgtcccaattttcccagtacagtctgtcacgggttccctcatctaggaaaggtaaatcccctaaccccttgtgcttcccggtgacgcaatgccccaccctgcttcagctagccctccatgggctgcatccactgtccaaccagcccaatgagatgaacaaggtacctcagttggaaatgcagaaatcacccatcttctgtgtggatcaggctgggagctgcagaccggagttgctcctattcggccatcttggaatggcaatctatgtttgctttttacatttgaaaaaactggtgtcacgtacctaggtattaatcattgtggtatcctcttgccgatttacctctttatcattaactagtgaccctccttgtcttttgttgttacagtctgtgattttagtctattttatctaatatgagaatagctactctggcacttttttggtttccagcttcatgaaatatccttttccatttccctgttttcatttccctttcggtgtctctatagatgaagttgatttctttaaggcaccataagttgggtcttatttctttatccatttgaccatttagagaatttagaacactgtcagtgttattattcataagtaaaaacttaagagtgggtgtagtggtgtacatctgtatttcctgcactttgagagactgaggcgagctgatctcctggggtcaggagtttgagaccggcctggtcaacatgatgaaaccctgtctctactaaaaatacaaaaattagccaagcatgctggcatgtgcctgtaatccaatttacttgggaggctgaggcaggagaagcttgaacctgggagacaaatgttgcagtgagctgagatcacacagagaagtcatctccactctcctcatcagaacctcttgttcacagcatttgtgagcacaaatcaatgatggttattctttcctactaattagggatattttattacacagcaatagcctccagcaaagggaaccatcatacatgattcctacaagttgacagggctggaattatcactgaaaaactaaggtggctatacttgattcccaatgtccaatttttcatgaatagagaaatttatcctttttccccccagccagaaaccaagttttgctcttacgcccaggctggaatcaagtggcacaatctcagctcactgcaacctctgccccccagcttcaagaaattcaccttttgaacaaggagatattaaggatacactatgtgtatgctaccggtggttgcaggagactcagaaaagagagaaacagtcactggcctcgtgcaactgatattctcgggaggagagaaaggcaatcaagaaagaaacatgctgtatttcagacagctgtaagtcctccacaagaaaagaaagcaggtgaggaacataggaaatgtgtcaaccataaggttcccgctaattctataagttggtcagggatatcctccaagaataagcagcatctgagcaatcacctgaagggaggaaggaaggaagactgtgagtggtggcttacacctgtaatcccagcactttgggaggccaaggagggcagattgcctgagctcaggagttcacgaccactcagagcaacctgttgatacccaatctctactaaaaacacacaaaaaaattacccgggtgtggtggcacgcacctgtagtcccagcttccatgcccagctgatttctctctctccatatatatatatatatacacatatattgtttttgcagagatagggtctcactgtgtcacccagtcatcaagcaattctcttatactgttttggaaaagcatgggaattacaggtgtgaaataccctgctggtcctgaaaaatgtgatatttgggattctctgcctggcttgttttacccaaaataatgacctccagttccttccaggttgctgcaaaagacatgattttcactgttttataactgaatagtattcctgtatgtatacataccacattttctttatttattcttctgttgattgacatgtagggtgattccatgtctttgctactgtaaataatgctgcagcaaatatttgtgtgcattttgatctattcctttgagtaggtacccagtactgcaactgcaggactgagtagttgttatattttttgttctttcagaaatctccatagtgtttgccataaaatctgcactaatttacattcccaacaacaatgcataagatttccccttttctccacattctcactaacatttgttatgtttttgtctttttcataatacccattctgactggagtaagatatctcattgtggtggttgttgatatttttgagacggggtctcactctgttgccagactggagtgcagtggtgtgatcgtggcttgctgcaacctccacctcccgggttcaagcaattctcctgcctcagcctcccgagtagctgggactacaggcgcgtgccaacaggcctggctcattttttgtatttttagtaaagacagggtttcaccatgttggccaggatgatcacagtctcttgagctcatcatacacctgcctcagcctcccaaagtgttggaattacagtcatgaggcagcgcacccaacctcaatgtggttttaatgaccatttctctgacgattcatggtgtggagaatttctttgaaataccttttggccatttatatgtgctcttttaaaaactgactcctgtccaggtgcggttgagcatgcctgtaaccccagaacttcgggaggctgaggccaatggatcacttgaggcaaagaggcagaaatcagcctggccaacaaggcaaaaccccatctttactaaaaatacaaaaaatcagccacgggctgtgactcgtgcctgtggtgcaagttactcaggaggttaaggcacaggaattgcttgaacccggtaggcacaggtcacagtgagccaagatcatggcactgcactacagcatgggtaatagagaaagacctgtctcataaaaacaaatgaataaataaataagataaaaaataaaaaagtctctttatgtcctttgccgactttttaatgggattctttggagttttctgttgtagttgagatctttgtttactctcggtattagtcttttgtcaaaggaaaagtttacaaataatttcttccgttctgcagtttgtctgctcactctgttgagaggattatttctttggctgtgcagcagctttttgtttcagtaaagcttttgaatttatataattaaaattttcagtttggtttaaatttgcactggtcgatttttggttttgttgcctgtacttttgaagtcatactcttgaactctttactagacaataaccagaagagttttctctagttttcttctcacatttttattatttcagtacatatatttaagtctataattcatcttcaattgatttttgtagaaatagtgagaaataggagtccaggtttattcttctgcaaatgacaattcaattgttccagcaccaattattgaaaagggtgtgctttcctcaacgtatattcttatcagctttgtcaaagatcagttggctataaatgtgtggctttctttctgggctctctagtctgttacatcaatctgtgtgtctatctgtatactactaccatgctgtattggtgatgatggctttgtaatataatttgaagtcaagaaatgtgatgctcccagctttgtttatttgcttcagaaaggctgagtcaacagctgcagagatgaagctgcccctcctcgcagggctccttcccggaaaaagatcatggctcccactgaccatataaccatggctggaactcctgaaattcccaaagggaggccctacccagtgaggggggatgaatgaaggtcctacttaaggaatctgtctggccacaatcaggcacagcagctgtgctgccttgtgggggaccagaccacctggattccctggagcctgcaggctagaatgtctgagtccatggaaacacagaaatggaggccgccctcacctccccagaaaactgtagtctcaggcagtctccagccgattgccactggttggctgctattccaagccagtgggtcttaacttgagaggtgctgtggaagtggggcccacggaatgaggctgcttggctccctggattcagccccttttctaagggaatgtacagatggaactcccgccttgcccagctttccaagtatataaaactcctgagtctctgtgagtgtctgagcgagtgctctggcaacattcgacacggctctgtgtatctgacccaagacccttatggcatgagctaatgggaggatcttctgatccatgcgtggcaaagatgcatgggagaaacatggtttgtgggtaggggttgtgcattcactactgcttctcttggctgtaggtgaaggtttctttggctctgtgctgatactgggtgcaccatcacccaccccctttgtttcttctcctgggtcaagtcatttgcctaatcagtcccaatgtaggaacctggatacttcagttcaaggtgctgaattcaccgtgcttttcattcaggggaagacagctgcttctcattgggcatcttggcctgcccacttcacgtcactttttgtaaaatccacaccactccaggaatatccattacttaacttcgcctgaaataaacagaaggctcattacacttatcatgggctcacttacttcgcctataatgaaggtgccatggaaatgctagtggatgacgtggtccattttcttagggatgagatagaaaaatggtgtatggctttttaatttaattaaaatttttagtttggtttaaatttacattggtctctttttggttttgttgcctgtacttttgaagtcttactcgtgaactctttactggacaatgaccagaagagttttccctaagtttcttctgatattttgaccatttcagtacatacatttcagtctataattcactttaaattgatttttgtaaacatggtaagaaataggagttcagatttattcttccgcatatgataatgcaactgtcccagtaccaattattgaaaagggtgtgctttccctagtgtatattcttgtcagctttgtcaaagatcagttgcctatgaatgtgtggctttcattttggattctctcgtctgttacatcaatctgtgtgtccacatttatacctgtaccatgctgtattggtgactatggctgtgtaatatattttagagttaggaaatgtgatgctcccagctttgttcatttgcttcagctgaaaaggttgagtccacaattacaaagatggcagccgcccatccccggaggacctccaacccagaaagagatcaggcttcccaccaaccctataaccctggctggagttcctgaaattccaacagggaggaccttcccagtgaggagggatgaatcaaggtcaaatttaaagaaacagtctggccactatcaggcacagcagcagtgctgccttgtgggggacccctcctgctccagaccagctgccctccctggagcccgaaggctagattgtctgagtctacggaaacagagacggtggccgccccaaccacccagaactcggtagtctcaggcacttggcttgctatcttgccactgcttggctggtattccaagcccgtgggacttgagaagtgctgtgatgatggggaccacaggatgaggctgtctggctccctgtgatatggctgtgatgagtggaggaacaccagggctcatgtctcacacagaattggagaaaatgacacaaacacatgtacagtggttttatggcgtgcagtttaataggcaagaacgaaggaagagctccccatactgagacagagggaggggggctccaaagccaaaagaggaaacccggagtgctgtggataccaatgagttatatgaagaaactggagggggcggtgtctgatttgcatagggttcaggcgattggttcgaccaggcatgtcatttatgtggcccacggaaaaactggccctcccacctagcctttgaatatgcacgtgccggacaccctgatttcctacactcatggggatatatgggggtggccatatcgccaggcacaggtggggacaagggccagaagagggcgggaatcgctatgtttgggtggacccagtttctaatggccggcatctgcagatcaaggttaccggagaactctaaaagccggggctttcctgctagacaagactcatttctggagctgctttaaaaagaaacaaaacttcccaaggaccccttttcctccctgtctgcccaaaataatttcttaacaactcgtataacacctgaattcagcccccttactgggggaatgtaccaacggaactcccacctttcctggtttctcaaggctagattgtgtaaacctcctgggtctcggtctgtgtctgagcagctgctctgccaacactccacacagccctgtgtactaggcccaaggccgccgtgactcagcccatgggaggatctcctgatttcttggttgcaaagatccatgggagaaaaatggtttctggggcggggtcacacactcatggcttctcttggctgtgcaagaaggttcctttggctctgttccaatatagcgtggttcatcacccacccctgttttctttgttctcctgagtcaagttgtttgcctagtcagtcccaatgtgagaacctgaatatttcagttcacgtgcttatcgtgaaattcactgagactttaattcagtggaaggcagcctcttctaattggccatcttggcccgccccctccacgtcacctcccataaaatggccacgctctccagggacgatgccattatatatctttacgtgaaaccgacagaacacttattacactttttgtgagctcatttacttcacttataatgaacatggccatggaaatgctagtggagaaagtggtcgattttctgatggatgtgataaaaaaatggtttgccgaccaattaatgacatatgtctcaaaactagtaacgagacccttaatcgctgggttgaagtttctaatcaagaagatgctcatctatgtattcaacaaagcagcttcccttgcttctgaaatgcttccaaacaacatctcatatttcctgaagaagataatgcctggacaagcagcacaagtcattcaggtttactttcagctcataaatccagcaggatattcgcacaattgttgggaaaccttatcagttcatgagtcgtgcatgtttcctttaatttcaggaggaagagggtaatctggaagagtttcctgacctactctgctgctgtgattaaacaaccaccaggaaattttgatgacactgttctcctgagctcctccctttcctcggggaagaaaagcattgaaactacaaaaataaagtgttatttggctggagtgaggtctcatgtctgcttatgcggtggctcgctgctcagaacagggtgagtctctgagttgtacgctgaggaggggaggctgtcaatctagaaaaaacccattgcatgggacacctccatggggtctggggggctgaggatgaggagctggactggatctagggaaggaggaggtttcagagggtgaaattctggcagtaaatcctgggggtgtttgaaaacttcctccctcagaaggagaagactcagggaggaataaggacaaaccatgggtcccttgaggggcatttactaacttaagaggactttatcgggaagcagagtgacaatggcctccttgaggactgaggcccctggataaatgaggcccagatccagatccagtccatgggagatgagaccttcaagggacatatttttgttgggacagaggaaaagtgcagctctgcagctgcagaggaagccttggcagtgtgaaagcgaccttggagggggccctgtgcgttctgaatgcttctgaggtccatcccctgtccccgcctctttttctggattttttgggctccatggtctccgccatcttctgagcgctccacgctgccaccttcagttttctcttctgggctccaaatactccaaaatctttcatatctgtgcccctacccctgtttttagcatgtgttgggactccaggtccctgaaggtttctggcctgaaatccacctccccagcggtgtggattctgctctagagaccccgcacttggcaaggttcccaggcccctgggggacaaccgagtggtatgtgcacttcagggctccacactcggcaaggtctttcaagcccttggggttccctcctcagttttcttcacatgtctgggatgtagtcactctataaatgccgggatgtgatccccaccccagtgattttttttagttccatgagtgttgctatctgaatagtcatcctgagagtgatgggaccttttgaatttgcagcaagttttagattagtgtgagtggcctgagatcgcaaaactggggctagcattggatgtgaggttaggctggtggaaaaatttgcccagaacctgaggagtgtgggctcactgcaggtggttaggatcagcacagaattgcaaggatgtatagctttggggtaaagaataacatggttcagaagtacatgtattagtcttttcatgcattgctataaagaattacctgagactgggtaattaattataaaaactcaggtttaattggctcatggttccacaggctgtacaaaaaggatgatgctggccatcagctcaacttctggggaggcgtcagaaaacttagagtcatggcaaaaagcacaagggaatcaggctcatcctccatggccagagctggagctagtggtaggagaggtgctgcacacttttgaacaatcagatctttttagaactctatcaccagacagcacctagaggatggtgctaaattattcatgaaatatccacccatatgatccactcaattctcaccggcccaaccaggaccacctccaccattggggattacaattacacatgagatgtgggtggggacacagatccaaactcgatcagtgggcatcttggactgggtctactatagaagaagaaccaggagctgactatcatccttaagactgcccatgatggccaggcagggtggctcatgcctgtaatcccagcactttgggaagccaaggtgggtgaatcccctgaggtcaggagtttgagaccagcctcgccaacatggtgaaaccctgcctctactaaaaacacaaaaaattagatgggtgttgtgccagacgcctgtaatcacagctactccagaggctgaggcatgagaattgcttgaacctgggaggcggaggtggcggtgagccccaatcgcactgctacactccagcatgggcaacaataccaaaacatcgtctcaaaaaaaaaaaaaaaaaaaaaaaaggctgcccatgaccactgccccagtgagagggacaccagcatggctaagatcaagtgctggacattcttcatgggtcagacattaaagcaggccacactgttacagagatgggctccattcatagcaacaaagtggtgagaagatgtgggaatggcagaggccagcactttgccatcaatgcaaggtgggcataaggagctggcaccagtgccagagtgcatcaggggaggactgctttgcaatatctagcacttacctcttagagtatgtttcattagggacaacagatataaatggcagacaagtgagtcccttcagtaacaggaaatagaaatcatcaagaggaacagaaacagatgtcagcagccctcatataaagtcatcatccttcatccagttaaaacctgagacagttctcacataagaaggtctaattcaaaaagagactgggttctcatgaggcaggttcatgcaaaaccaagggaagtatacaactttgggattctccagcttcccttggaaaagacctacaatcatttgcttaggtaactgagcactgaacaaaggtgagtattgttatctttcagaagctgttggccatgaaggtcttgctggcataaaacccatggttggaaacatcaccatgacccctgttagagtaatggcctaagggcaagggtcaggaaattgatgtattccttgccaacttctgcgagacgagtgttggtccactcatctctttcacggaattcaccagtctggtatcttcaaaatccagaaggatgatggcagatggcaggaaactaatgcaaacaccatcagttgtacctccactgtagcagcagtaatggatgttatctcttcattgtaatatccagggagggagaagatgacattattctcaatattctaaacaccctgtgtgtacagcctctgtgatattttttgtaatatccgtgtgggagagaattatattactcctaatatctcaggggttgtgccccctctgtgacaatgttcctaacacccaggaggggataggatgatatcacttttagcatcacagggggtgtacaccccactgtaatattgttcataatatccgggggggagagaatgatattactcccaatatcgcaaagactgtacaccaacctgtgatattatttgtaatatccataagaggaagaataatattactcccaatgtcacaggaagtgtacacccttctgtgatattgttcaaaagatccagttagggaggggatgatattactctcaatatcttaaacaccctgtaggtaagccctctgtgatattcctcataatatccagagggagaggatgatattactcccaatattgcatgaagtctacaccccacctgtgatattgttcctaatatccaggatgggagaggatgatattactcccaatgtcgcaggggatgtacaccttccctgtaatattgttcgtaatatctagaaaaggagaggataatattactttcaacatcgcagggggtgtacaccttccttgttatattgttgctaatatccagggaaaaagaagatgacattaccaccactattgcagaaggtgtacacccccccttgatatagttcctaatatccagaaaaggagaggagatattactccaaatattgcaagaggtgtacattcccctgtaatatttttcctaacattcaggaagaaagagagtgatattgcccttaatattgaagggagtgtgccccccccgtgatattgtttctaatatccaagaaatgaaaggatgatattactcccaatatcacaggggctgtacagccccctcccatgatattgttcccaacatcggggggggggtgaaatagtattattcccagtatcacaataggtgtacacacctgtcgtgatattgttcctaatacccatgggggaaaggacgatattattcttaatatctcagagggatgtacaccctccctgtgatattgttcctaatatccggggtgggagaggatgatattacccccaaaatctcaaagggtgtacacccctcttgtgatattgttcctaatatccagggtggagaggataatattattcccaatatccaggaaaggaaacgatgatgttactgtgaatattccagggggtgtcctcccctctgtgatattgttcctaatatccaggttggggagattatgatatttctccaaatatcacaaggggtgtacaccaaccctgtgttattgttcctaatatcgatggggggagaggacgatattactcccaatatcacagggggtgtacaccacctttatgatattgttcctaatatccatgaagaaagaggatgatattactttcaatatcgcaggggatgtacactccccctgtgatattgttagtaatacctaggagaagaaagtgtgatattactcccaatatcgcaggggatgtacacgcttcctgtgatattgttcctaatatttagggggaaaggggatgatattactcccaatatcgaatggtgtgtacacccccccgtgattctttttttttttttttttttttttttgagatggagtcttgctctgccgcccagactggcgtgcaatggcgcaatctcggctcactgcaacatttgcctcccaggttcgcacgattctcctgcctcagccttcggagtagctgggattataggcagctgtcaccataccaggctaatttttgtatttttagtagagttggggtttcaccatgttggtcaggctggtcttgaattcctgacctcaaataatccacccaccttggcctcccaaagtcctgggattacaggcataactttccctgtgatattcttcctaatattcaggaagaaagaggatgatattgctcccaatatcgcagagagtgtgcactcctcctgtgatatggttcttaatattcagaggaggagaggatgatattactttctatattgcagaaggtgtacacctccctcgtgatgtctttcctaatatccagtgggggagaggttattagtctcaaaatcacagaaggtgtaaacccccatttgatattgttcctaatattcaggggtggggagagaaaggtattactcctagtatttcagggcatgaacacccccaccgtgatatcattcctaatatccagaaggggaggcaatgatatttctcctaatatcacaaagggtgtacaccccttctgtgatattgtaaatattctgtgtgtacacccccctgtgttatagtctgtaatatccgggtgggggagagggtgatatttctccccatattgtaggggatgtacacccttctgtgatatggttcgttatatccagggaagaaaaaggtaatattgctgcccatattgtggagagtgtacacccccatgtaatatggttcgtaatatccaggagtggagagggtgatactgctccttacatcgaggaaggtgtacaccttattgttatatgattcgcaatatccaggggaggagagagtgatattgctccccatgtcgcagggggtgtaaaccctccgtgatatgattggtaatatccaggaaaggaaagggtgatatttctccccatatcgcgggggacgtacatcctcctgtgatatggttcgtaatatccaggaggaaagaggaaaatattgctcttcataacccgaggggtgtacaacccctgtgatatggttcgtaatacccagaagtgtacacccctctgtgatatggtttgtaatatccagggggttagagggtgatattgctccccatatcgcagtgggggtacacccccctggattggttcataatattcatggggggagaaatttacatttatcctcatatcagggggggtgtacaccccccgtgatatggttcgtaatatccaggggaagaaagggtgatattgctccttatatcgcggaaggatcaccctcccctgtgatatggttcataatacccagacgggaagagggtgatattgttcttcataaagcgaagggtgtacagccccctgtgatatggttcataatatgcaaaaggggagagggtgatattgctccccatatcacggagggtgtactcccttctttgatatggttcgtaatatccaggggtgtagatggtgatatagctcgccctattggggagggtgttcacccctctgtgatattgttcgtaatgtccagggaaagagaggatgatattactcccaatatcgcagaaggtttacaccactctgtgatattgttcataatatccagggaaggagaagacgatattactcccaatatggcagggggtgtagaactcctgtgatattgtttgtaatatccaggcaaggagaggatattactctcaatatcgcagaaggtttacacccctatgtgatactgttcatgatatccagggaaaaagaggatattactccctatatcacaaagggtgtacacccctttgtgatattttttgtaatatccaggggagagaggataatattactctcaatatcagaaggggtgaaaaccctcctgtgtcattgttcataatatttagggaaggagagagtgatattactccaaatatcacagtgggtgtacacccccctatgatattgttcctaatttccagaaggggagatatgatattattgccaatatcgcagaaggtgtacaccttactctgacattgtttgtaatatccagatggggaaatgatgatattactcctaatatcacagggggtgtacacccccttgttttattgtttgtaatattcaggggaagagacgattatattactcccaatatcgcagggtgtgtacaacactctatgatattgttcataatatccaggggaggagaggaagtgtacacccccccgtgatattgttcgtaatatccagaggtagagaggatgatattactcccaatattgcaggtggtgtacacctttctgtgatattgtcatgatattaagaaggggagaggatgatattactaacaatatcacaaaaactgtacactccctgtgatattgttcataatatccagaagaagggaggatgatattattctgaatctcgcagaagatatacaccaccctgtgatatggttcataatatcctaggggaaagaggatgacataactgtcaatatcgcagggggtgtacaattccctgtgatattgttcacaatattcagagggaaaaaggataatattactttcaatatcgcaggcggtgtacacattactgtgttattgtttataatatccggaatgagagaaaattttctcccaatatcacaggaggtgtacactcccctgtgatattgttcgtaatatccagggaggggagaggatactattactcccaacatctcagggagtgtaggccccccctttgatattgttcctaatattcggaagtggagaagatgatattacttccaaaatcgcagggggtgtacactccctctgtaatattgtttctaatattcatgagtggaaagaaagatattactcccagtattgcaggggacatacaccacactgtgatcttgttcacaatattcgggggggagaggatgatattactcccaatatcaaagtaggtgtacacccccttctgatattgatcgtaatatccagaattaaagatgataacgttactcccaatattgcagggggtgtacatttttgaatactgttcataatattaagagggggaggggatgatatctgtcccaatatcgcaaagtgtgtacacctcctgtgacattgtcccaaatatccagaggaaaaaaggatgttattactcttaatatctcagagagtgtacacctccctgtgatattgtttgtaacatccagaagaaagaggctgatattactcttaatatcgcagggggtgtacacccccgccccgggatattattcgtaatatccagggggaagtggaatgttcagaatgggagaggatgatattacttgcaatatcatagtgggtgtacaccccactgtgatattgtttgtaatatccgggaaaggagaaaatgacattcctccccatatggcaggggctgtacaccacctatcatattgttcaaaatatccagaaggggagaggatatgtctccaagtatcacagggggtgtacaccccgctgtaatattcttcctaatatccagggtgtgagaggataatagtactcccaatatcccagggcatgtacaccccccttgtgatgttgttcctaaaattcatggggagaaagaatattactcccaatatcacagggggtgtacatacactctgtaatattgttgccaatatgcagcaggagagaggatgatattactcccaatatcacaggggctgtacaccccgctgggatattgtttctaatatcaagggggaaaaaggatgatattactcccaatgtcgcagggtgtgtacttcctctttgtgacattgttcctaatatccaggagagaagagggtgacattccttccaaaactgaaaggggtgtacacaccctttgagatattgtctttaatatccagaacgaaacaggatgatataactcctaatactgcaggggggtacaccctctctgtgatactgtttctaatatccaggaggggaaagaaaaatattaatcccaatatcacagggggtgtacattccccctttaatattgttcctaatatccaggaagacacaggatgatactatttccagcagcacagggcatgtacacccctttgtgatattgttcctaatatccaggaaaagagaggatgatattactgtcaatattgcagggcgtatacactggttctgtgatattgtttctaatatccgggggtggagaaaatgatattactcccaatattccagcgggtgtacacccgttctatgatattgttcctaatatctgggggagagagaatgatattattgtcaatatcacaggggatgtacagattccctgtgatattgtttctaatattcacagggggagaagggtataatactcccgatatcgcagggggtgtacactccccctgtgaagttgttcctaatatccagggattgagagaatgatattactcccaatatcacaggcggtgtaaaccccctgtgtgatattgttcctaacatccagaggaaaagatgatgatattattttcaatatcacagggggtgtacgcatccctgtgatattgtttctaatatccaggggaggagaggatgatattattgttaatatcgcagggggtgtaccccaccctgtgatactgttcctaatatccggggtggaagaggataatattgctcccaatatcgcaaagggtgtacaaccttcctgagatattggtcctaatatccagggagggagaggatgatattactttcaatatcacagggagtttacacaacccctgcgatattgttcctaatatccagcggaagaagagttaggataatactattttcaaaattgctgggtctgtaccccctccccgtgatattgtttctaatatccaggaggggagaaagtaatatgactcccaatatcttagaagatgtacaccctccccataatattatttcttacatccagggggtagaggatgattttgctttcaatatcacagagggagtaaacctttccggtgatattgtttttaatatttaaaaagagagaagataaaattactcccaatacaaaggggatgtattgtgtactcccccctctgatattcttttttaatatccagatggagagaggatgatattactttcaatattgcatgggatgtataaatcccctgtgttattgttctgaatatacaggtggggagagtatgatattactccaaatatcgcagggggttctttccccctgtgatattgttcctaacattcagggagggagaggatgatattactcttaatattgcagggggtgtacccacgcctatgatattgttcctaatatccagagggggagaggatgatctaactcagaatatgacaaggggtgtacacacagcctgtgatatggttcctaatatacaggggagaaggggataatatttctcccaatatcgcagggggtgtacaaccccctgtgatactgttcctaatatacagaaggggacagcatgatattgttcctaatatcgcaggaggtgtacaacgccctgtgatattgttcctaatatccagggcgggagaggatgatattaccctcaatatcgcagggggtgtgcactttccctgttatattgttcctatgatccgggtggggggaaatgacattagtcccaatatcgcaggatgtgtgcaccgctcccccgtgatattgttcctaatatcaagggggagagaggaggatattactcccaatatcgcaagggatgtacatcctccatgcgatattgttcgtaatattcaggaggagagaggatgatattactcttaatatcgcagaaagtggacacccaccctgtgatgttcttcataatatccagggaagcagacgattatatgactttcaatatcgctgggagtgtacatcccttttgggatattgtttctaatatccaggaagggagaggattatattactctcagtattgcaggcagtgtacaccttttttgtgatattgttcctaatattcagaaagggaaaggatgatattactcccaatattgcaggtggtgtatatccccctctgatattgttccttatatcaaggaagagaaagaataatattactcccaatatcaaagacagtgtagacccctcctgtgatattgtatttaatatccatggggaaagaggatgatgttactcccaatatcgcagggggtttacacccacactgtgatattattcctaaaatccagtggaggagaaaataatattgctcccaatattgcagggtgtatacaggccctcccccgttatattgctcctaatatccagcggtggagaggatattactttcaatttgtgtagggagtgtatacccccctgtgatatttttctaatatcaaggatgggaaaggatgacattactcccaatatcgcaggaggtgtacacgccctgtgatattgttcctaatatctagggaaggagaggatgatattactttcaatattgcaggagctgtacaccctctgtggtattgttcttaatatttaggttgggagaaaatgatatgagtccaaatatcgcagaaggcatacacacttccaataacattgttcttaatatccgggggagagggtgatattactcccaaaatctctggggggtgtacacccccttctgatatttttcctaatatccagggaaggaaacgatgatattactataaatattccaaggagtgtacaccttcctaatatcctaatattgttcctaatatccaggggtgggagaggattatattactcccgatatcgcagtgggtgtacacccctcctgtgatattgtttctaatatccaagctaggagaaaatgatatcactctcaataccacagggggtgtacaccttccgcatcatattgttcctaatattcagagggaaagaagatgaagttactttcaatatcggaggggttgtacacaacccctgtgatattgctgctagtatccaggaagaaaggggattatgttactccccttatagcagggggtatacacctcccctgtaatattgttcctaatatcaaggctgggatatacgtggggggaaggatgatattactcccaatatcgcaggggttatacaaccttctgtgatattgctcctagtaaccagggcagaagaagatgatattactcctaatatcgcaggaggtgtacactcccccattatgttgttcccaatatgcagaaaaggagaggatgacattattgccagtatcgcagggtgtgtacaccacccctgtaatattgttccaaatatttagggggagagaggatgatattactcccaacatcgcagggggtgtacacacatcccctgtaatatagttcttaaaatctaggggaaaaggggatcttatttctctaaatattgcagagggtgtacactccccggtgatattgttcctaatagccgggagggagataattaaattactttcaatatctcagagagtgtacatcgcccttgcgatattgttcctaatatccagagcaaaagagaatgatattactcccaatatcttaggagtgtacatttaacctgtaatattgttcctaatatccagggggaagagaatagtattactgccaatatcgtaggggttgtacaccttttctgtgatattgttgcaaatatttagtagagggaaagaatattactcgcaatatcacagggaatgtatacttcccctgtgatattgttctgatatccagaaaaagagagggtaatattactcccaatattgcagggggtgtacaccccccttgtgatattgatcctaatataaaggaaggaagaggatattactcctcatatagaaggggttgtccaccccccttgtgatattattcctaatattcagggaagcagaggatgatattattttcaatatcacagagggtgtgcagtccacctgtgatattgttcttaatattcggggggagaggatgttattatgcctgatatcgcagtagaggtacacccctcaagtgatactgttcctaataaccaggggtgaagaggatgatattactcccaatatcgcaggtggtgtacacccccccatgatggtttctaatatacagagggggagaggaaaatattactcccaaaatcgctggaggtctacaccccccttgtgatattgttcctaatatccaggaaaggaaacgatgatattactgtgaatattccagggggtgtacacccgctttgtaatattgttcctcatatccagggtgtggagaggattatattactcccagtatcgcagggggtgcacgacgcccctgtgatattgtttttcatatccaggaggggagattattatcaatatggcaaggggtgaacaccccctgtgatattgtacttaatagttaggttggcagaaaatgatattagtctcgatatcgcagggggtgtgcactccgcctggtgatattgcttttaatatcaagggggagaaaatggcattactcccaatatcgcagggggtgtacaccgctcatgtgatattgttcctaatatccaggtggagagaacataatattactcccaatatcgcacaaggtgtacacccctcctgtgatatggttcctaatatccatgggaggagatgatgatattactcccaatatcacaggggatgtacaccacccttgtgatattgttcctaatatccagggaagaaaacgatgatattattgtgaatattacagggagtgtacacactccctgtgatattgtttttgatatacagggtgggagaggatgatattactcccaatatcacataaggtgtacaccccccgtgatattgttctaaatatttcggtggggagaaaatgatattagtctccatatcacagggggtgtgtgctcctcaggtgatattgtttttaatatcaagagggggaggagattatattactttcattatcacagggggtgtacacccctcctgtgatattgttccttatatccaggcgaggggaaaataatattactctcaatatcgcaggaggtgtacacaccccatgtgatattgttcctaatattaagggggaaagaagataatattactttcaatatcacagggtttgtactcctttcttgtgatatagtttttagtatccagggggaaagagcatgatattactcccattgtagcaaggggtgtacacacctcctgtgatattgttcctaatatccagaagtggtgaggatgatattactcccaatatcgcagggggtatacaccccacctatgatattatttctaatatccatgggaaaagagtatgatattacacccaatgtcgcagagggtgtgtatttttcctgtgatattgtttctaatattcaggcggggagaagatgatattactctcaatatagcagaaattgtacatccccgctgtgatattcttcataataatcagggaaaaagaggatgatattactaccaatattgcaggggggttacacttcccctatggtagtgttcctaatatccaggaagaaagaggatgatattaatcccattatccaggaagtgtacacccaccctgtcatgttgttcctaatatccagcagggaagaggatgatattacaccccccccccgtgatattctccttaatatccaggaggggagaggctgatattactggatatatagcaggggtgttcataccttctgtgatattgttcctaatatccagaaaaggagaggatgatattacttccaatatcgcagaaggtgtacacctccctgtgatattgatcctgacattcagaaggggagaggatgatattactcaaaataccgcagggcatgtgcattcccttgtgatattgttcctaatacccagaagggaacaggataatattactttcaatatcgcagggagtgcacacccccctttggtatggttcttaatatccagaaggaaagagggtgctattactttccatattgcaaggggtgtacaccccactgtggtatggttcataatatccaggcagggagagggtgctattactccccacagtgcggggcatgtacaccctgctgcggtacggttcctaatatccagggggagagaggatgctatgactccctatatcgcggggtgtgtacacccctgtgtggtatgttttgtattctccaggaacggagagggtgttgttacccctcatatcgctggaaatgtacactcccctgtggtatggttcgtaatatccaggggattgagggtactgttacccccatactccccatatcgtggggggagtgcacctccctgtggtatggttcgaaatatccagggtaagagagggtgctattattccccattttgcaggaggcgtacacccccctatggtatggttcgtaatatccggggtgaggggatgctatcaaaagaagagagaaagagaccccccatattgttctatattattttatactcagtacctgttttaagaagaaacaaggaagtgaaaccaaaagcaggcagcccggcgccaggcaccagacccaaaaccagacccgaaaccaggcctgggcctgcctgaccttagcctgatagttaaaattcaacccatgacctagcaaccaatgttatccatagattccagacattgtatggaaggacattgtgaaatttcttgttctgtgctgtttcactctgattaccggtgcctgcagcccctgtcacatacccactagattgctcaatcaatcatggccctttcatgtaagatctttagtgttgtgagcccttaaaaaggacagaaattgtgcactcaacaagctcggattttgagacgctagtctttcgatgcttccagctgattaaaagccacttccttcactacctcggtgtctgtggggttttgtccgcgactcctcctgctacactatgactccccatatcaaggggggtgtacacccccctgtggttcgtaatatccagcaggggaaaaggtgctattactccccatattgcagggagtgtacacccccttgtagtatggatcgtaaaatcaaggggggagggaaggtgtaattatccccatatctcagggggtgtacacccctttgtggtaaagtttgtaatatccagggatattacagggatattatccccaaattaatacttttataatttcttatgcctgcctttactgcaatctctgaacataaattgtgaagatttcatggacatttatcacttccccaatcaatacttttataatttcctatgcctgtctttactttaatctcttaatctcatcatctttgtgagctgaggatgtatgtcgcctcaggaccctgtgatgattgcattaactccacaaattgtttataaaacatgtgtatttgaacaatatgaaatctgggcaccctgaaaaagaacaggataagagcgatgttcagcgaacaagggagataagcataaggtctgactgcctgtggggctgggcagaacagagtcacatttttcttattgcagaaaatgagtaggagaaatatcactgggaagggaacgcattcctaggggaggcctatggacggccgctctgggggtgtatcccttatgtggttgaagataagggatgaaatacaccctggtcccctgcagtgccctcaggcttgctaggattagaaattccagcctggcgaattctagtcagaccagttctctgctcttgaaccccgtttcctgttaagatgtttatcaatgacaatgcgtgcacagcaggacatggaacctcaatagtaattccattttctccctggccttgtgaccttgctaggcccttctgcccttgtgatcttttattgccatttgaagcatgtgatctctgtgacccactccctattcgtatccccctccccttttgaagtccctaataaaaacttgctggttttgcagatcaggtggtcatcacagaacctgccgatatgtgatgtcaccccggaggctcagctgtaaaatttctctttcgtactctttcactttatttctcagaccaggtgacacttaaggaaaatagaaaagaacctactttgaaatattgggggctagttcccccaatagacattgttcctaatatccagaaaaaaagaagatgatattactcccaatatcacaggggttgtgaaccccacctgtgatatggttcctaatatccaggaagggagagaatgatattactctccatattgcagggggtgtgcacatccctgtgatattgttcctaatatccaggggaggagagggtgatattactcccaatattgcaagggttgtaaactccaccctgtaatattgctcctaatatttaggatttagggggggagaggataatattactcccaatatcgcaggggatgtatatgccctctttgatattgttcctaatatccagggggggagaggataatattactttccatatcacaaagagtgttcacccccctgtgatattgttcctaatatccaaaaaggaagaggatgatatcaatcccaatatcacaggaagtgtacaccccccccttttatattgtttctaatatccaggggaaatgagggtgatatttctctcaatatagcagaatgggtacactccccctgggatattattcctaatatccaggggaaaaaaagaggttgatattcttcccagtatagcagggaatgaatacaccctttgtgatattgcttctaatatcaaggggaaaagaggatgatatgactcccaatatcacaggggatgtaaacctgtggcgttgttgctaatatcaaggagggaagagtatgatattactcctaatgtcgccgaaggtgcacactttccctgtgatattgttcctaatatccaaaagggaagagaatgatattacccccagtattgcagggtgtacaccacccctgtgatattgctcctaatacccaggaaaaaagagaatgctattacccccaatatctaaggggacgtataccttccctgtgatattgtttctaatatccaagtggggagaggatggttttactctcaatattgcagggagtgtacactccccctgtgatactgtttctaatactcgggctgggagaaatagtattactcccaatatcgcagtgatattgtttccctgtgatattgtttctaatatctagtgggggagataattatattactaccccatacacaggggagggtgtacattcccctgtgatattgtttgtaatatccagggaaggagaggatgttactcccaatatcacaggggttgtacaccccttttttgatattgttcctaatatctggggggcagagaattatattactgtcaatatcacagagtgtgtacaccccctctgttatattactctttatattcagggcggtagaggatgatattactccctatatcacagggggtgttcacccctcctgtgatattgtttataatatctaaggggaaagaggatgatatcactctcaatatcaaaggaaatgtacacctttcctgtgatattgtttttattatataggggggcagaggatgatattaagaacaataccacaggggatgtacacccacgtattgatattgtccctaatatgtatggggaaagaggacagtgtaactcccgatatcgcagagtgtgtacacccccttgtgatattgtttctgatatacacggggagaaaagataatatttcttccaaaattgcagggggtgtacaaccccctgtgatattgtttttaatatccagtgggggagagaatattactcccaatattgcagggcgtgtacacaacccctgtgatattgttcctaatatccagagtaggggaggatgacattactttcaatatcgcaaggggtgtacattcccctgtgatattgctcctaatatccatgaggggagaggatgatattattcctaatatggcaggggctgtacaccttccctgtgatattgtttctaacatccagtgggggagaaaatgatattactccctatatcacagaaggtgtacactttccctgtgatattgttcctaatatccagaaggggagaggataatattactcccaatatcgcaggaagcttacaactcccctgtgatattgtttctaatatccagggaggtagggatgatattactcccaatatcgcaggggatgtacactcccccgtgacattgtttctaataaccagggggtgagaggatgatattacgcttaataccgaagggggtgtacacacccttgtgatattgtgcctaatagccagggggaagaaaattatattaattttaatatttatggggaaaaaggatgatattactcccaatatcacaggggctgtacaccgaccttttgatattgtttttaatatccagaagagaagaggataatattgctcccaatatcagaaaaggtgtaaaccccttctgtgatattggtcctaatatccagggagggagagaataatattactaccaatatcacagaaggtgcccacccccaaggtgatattgctcctaatatccaaagataatagggtgatgttactcccaatatcacaggaggtgttcacaccccttgtgatattgtttctaacgtacagggaagggagaggatgatattattcccaatatcacaggaggtgtatactcctctgtgatattgattttaatattcggggggaaaggatgatattactccctatatcgcagagggtgtacaccctctgtaatattgatcctaatatccagggcgggataggatgatattactcccaatatcgcagaaagtctacacaacccccagtaatattgtttttactatccagggggaagaggatgacattactcccaatttcacagagtgtgtacactcaccatttgatattgtttctaatatctagggggagagaatatattactcccaatatcacaggaattgtacaccacctctgtgacattcttgtgaatatccggggaaaaagagaataatattactcccaatattgcagagcgtgtacacccctccatgatatcgatactaatatttttttaaagaggatgatattactcccattgtcacaggatgtgtacaccccccttgtgaaattgttcataatattctggggggagagcataatattactccccatatcgaaaaaggtgtccaccctccttataatatggttcctaatatccaggatattacttaatccaggatacttgtaataccctaaatatacaattgcttgaacctccacctcccaggttcaagcaattcttctgcctcagcctcccgagtagctgggactacaggggcacaccaccacacccagctaatttttttttcttgtatttttagtagagatggggttttgccatattggccaggctggtctcaaactcctgaccttgtgatctgcccacctcagcctcccaaagtgctgggattataggcgtgacccaccgtgccaagccaggaagaggatgctctatagatttccccaataagagatggctttgcagggccattccaaaatatgtcaaagaaatacatttggggataaaatactttgatttcctttagggaatgttatctattatgtgatgctataccagagtcaggttggagtcggttatcttattgcaacaaagagtctgttccgtcactgttgggatctctattttttcctcttatttcttgagacagggtctcactctgtcacccagtctggagtgcagtggtgcgatcttcattcactgaaacctctgcctcctgtgttcaggtgattctcgtgcctcagccccttaagtaactaggattacaggtgtgcgccaccacacccagctaatttttgtattttcagtagagatggtattttgccctgttggccaggctggtcttgaactcctggcctcgtgtcatctgcccacctcgacctcccaaagtgctgggactgcaaatgtgagctattgtgcccagccaggatctctgttttaatgttagtgctggtcactttgcatgaactccaaagggaagaaatataatgaggtgtgtctgaccccctgccttctcatcgtgacctgaattagtttttcaggtttgcaggggatacccttggacaagaaggggctctattcggttggttggggggattagaattttactttttgtttacaatatttctcctgaaagagttaggggctcacaaggaatttccgcgtgagcaacttatgaggaaagccatctgggaagatatgtgtccttgtgtcactgggatattctcgtttaccccaatgatacggcaatgacgcagggttgtgaaattacagctatgtgtttggggaaaaaagaaagcaggattgtgtgactacgtttccaaacttcacttgcccttagccatagtgagttgggggcctggagattctgttttctttcacaatgatatagatacaattaaatgtatagaaagcaaaaaaataaaaaggtgagtaatgaggaacctctgattcctgagtggccatgtagttacccatggcacagagccacagttactgaaggtaaagtttgctggggaatttagaaatgaatccagctcttggaggagtcagtttactggatgcctaagaaaatgcaaacaaaataagaaaaaagggtaatattcaatcccatagttattgttacctgtcatagctaaagtaaaattaaaacagagtgctggcttcaatcttgatgctacactaagcttagatttcagtgaatgtgagtctcagccactagctcagagccacctcccaaagaccaaatcatgtagggacaatagaaagtacttctgagaattgtggttaccaagaacctagtaactgttggggaggagcaaaacaaagtacagaaaccagagggtacaatctgagtgagactgctatcagcttctggaggagcctttactaaaatgaatgatgagagtaactggatgatgagagtaactaatggatgatgagagtaagcaatgtctttggttttcttttttttttttttttttttttagcagacgtctcactcttgtcgcccaggctggagtgtaatggcatgatctcgcctcactgcaacctccacctcctgggttcaagcaattctcctgtctcagcctcccgagtagctgggactacaggcactcatcaccacacctggctaatttttgtatttttagtattttctggtgagggtccaggtttccggaaacaactcagagacatatgttaagatgttatctttagttttcacagggaaccaaatatgttacgactccaatttccttggctattgttttaagttaccattaccttctcgttgatcaagttgctcatttacttctcaagcctagctagatgcctggaatttcccttgaaggaagtcaagattttcctttatctccatactggctgatggtgatcgagtaagcccctaagaggggtccctgctccatctcgagatgctgctagattctacagtgcctaataaacagctctcgcctggccgacaaagagctgcttgctctctggatagcaattccaaagtgaacagacaacatcctgtttggaagactgccactctgttagaagaagcatcaggaaaacctttcttttgagctatttataactaacagcaattgaccaagtatacttttgtgagtgaaactgacctttctccctgtaagaattctccaaaatttggaaactatttgtgagtatttttacttatggcaatataattattggcacaagctcaatcagattcggttttctttcgtaacaggaaccattggagatactcattactctttgaaggcttacagtggaatgaattcaaatacgacttatttgaggaattgaagttgactttatggagctgataagaatcttcttggagaaaaaaagactgggtatattttcaatatgctttccttttaaggtccctcacctgtggaaagtaaagaatgtcactttctgacaggctcaggaacctcaagttatgtagggatctcaagaagatgggggaattcacccagttcatacaggtgaaattgctgttgcaaagattatgaatatgagagaagtccagcatggctgacttcatctcgtgtctggcctcaggctggctgcccttgctcactcttgggcataggccaagctagccatgggaggaatttagtttatagtttaactttgaagcacggatgataatagtctctccctaaaatgaaccccttccttgctcagggactgaaactacctttgtatgacaaatgaaagcccacaagattaagattatgagaggggcctgaattctgctaaaatgcaggtgtagctgactgataacaagtcattgtcccacagcttgcctttctataatctcttgcttctcaggagtcacatggccagaggtcctgagatttccagtcctgtgacccccacccagagatggacttagtgcatgaggaccattttccacacccctatgatttcatcctcaaacaatcagcagcaaccattccctagccccctgccttccaaattatccataaaaatcctagcctctgagttattagggagattgattaataatcccagtcctaccccttgggttgctctgatttaattaaaccttctctactgcaataccacggactcagtaaattggttttgtctgtgcaatgggcaagaagaacatgttgcatggttatacaggtactacaagcacagtctgatggcaaattattggttttgcttcctgcccttgatgtttctaaacatctagtccaaaattacttgtgaaaggtccagcaaagccaattttaaaagaggctatatggccaatcactattctttctacacattattgcaaataatcaggccacggctgggcacggtggctcatgcctgcaatcccagcactttgggaggctgaggcaggatcacctgaaatcaggagttcaagaccagcctaggcaacatgataaaaccctgtctctactaaaaatacaaaattagccaggcatggtggcatgcacctgtaatcccagctacttgggagactgagggaggagaatcacttgaacctgggaggcagagattgcagtgagctgagatcacaccactgcactccagcctgggcaatagagtgagactttgtctcaaataataataataataatcagaccaagtataatgaaattaaaatttattttgcaaataaattggtcctactacaatttatccttcatagaaatgtggaaactgaagataaaaaaaattaggtttcagaagaaaactatactacacctgttattagattctagccctaaacattgtttttgaggtttttattatttacctgcaatttggtctaaattctgaattatttcctgactacaagtatccaaggaataaatgggttttctttttctttatgatagttttagttggcttctaatgcaacaacaatttttattgtaatcctgtgtgcattctattcctactattcaaattattaatgttatagatctttcattgtagtacttctgaattaaccaaaatcacagtattctgaagatgattctacaaagcctgctgtttctacaaaggctgctgatgatttctacaaagcctgctgtagtgttgctgtggcctctgcttaaaaaagtagaaaacacattgatgcagcatgttcaccccaacctccctgcctaaaggctcagggaccatcttggaagaggaaggcgcgtgagattgtaagagccgaattagggggatggagtgtggagaataaggacacttcatcttggatgctcacctgccaaattgacttctgatgaaagccagctccagaaatgtgcctacagttactactttcacctaaaccctgcccttagtcaaatccttctcttcttctaagcaatcaacttcaattccttgtataacccacagtataaaagggcttttataccattctatcctattgcatgtaagccttgggtctgggaggtaacagtgtgggattccaccatctcatctccctgccacccaaacatgcctgctcttctttaagcaatattaaatgtttgtacttcagaaatttgatttgtcagcctcttcttcagactctcagcttctttggcctttgggagtaaatttgcataggcctgctcaaaacaggatgttctgggggtttgggggtgttgttttgttttgttttttgttttgtttagagacagggtctcactctgtcacccaggttggagtgcagtggtgcaatcatggcacactgcagcctcaaactcctaggctcaagcaatccccccaccttggcctcccaaagttctgggattacaagcataagccaccatgcccagccctggacttttctttaaagacatttacacagtgtaggaattactgtgggtgcactgctcaggtccccttctccaggatgctcattcctacctcatagatgattttcctgcagagatttgacctcagctgaagggcagtcacctggtccaggtggttgctattcacctccttcctgagaacagccaacagccagggacacgctagcacagagatataagagcgaccaaggtgaggccccttctgtgctgcggtgcatgctccagagcctccctgggatcagacttaagagggtctccagccagatctggtcttcgctgctttcctcgagctccccagcgcactcctgcaatgcatcttttttttttttttttttttttttgagacggagtttcactcttgttgcccaggctggaatgcaatggcgcaatctcagctcaccacaacctctgcctcgcgggttcaagtgattctccttcctcagcctcccaagtacctgggattacaggcatgcaccaccacgcccagctaattttgtatttttagtagaaacgggtttctccatgttggtcaggctggtttcgaactcctgacctcagttgatcctcctgcctcagccttccaaagtgctgggattacaggtgtgagccactgtgcctggcccaatgcacctcttgaatcacctcctcatgctttgcttttagagaacatgatccccaacatgtgattccagcaaagattctagaaagccaaccgtgacaatcacttctgggtttagatgacccccccccaccacaagatggcagtgagcacctcatcacagaggtgctgatggtctgcagcaccgcgccaggccagaacgtgccttttacagaagaaaataacccagtagctgactaggatggtgaggagggctggtgagcactgcggtagtgagagggacactagcatcactgagatgcaagtgatggtcatttttcataggtcaaagctcaaagcaggggacagttacagggcagggcttcatagcaccagtgtgatgaaagtatctgggagtggctaaggccagcactatgccatgggaagcaaggtgggcctgaggaggaggcagcagcgtcagcctgcaacaagtgggggctgccctgcagagacctaagagtcatgttatagagcacagtgtctgtaaggccaagaagtgtggacagccaagtgtgtcaattactagacatactcaagaggagcaggaagggcagggcatggtggctcatgcctgtaatcccagctacttgggagactgaggaaggagaatcgcttgaacccgggaggtgaaaattgcaatgagccgagatttcgccactgcactccagcctgtgtgatgggagcgggactccatctcaaaacaaaaaaagaaaaaggaaaaagaaaaaaagaaaaacctaggtatacttctcaagcaaataaaaataatcaaaaccaatatcatgcccgggcacaaatttcatatatataacagatttaaatatatgagggtgattatcctctcatatctccatttttttttgtttttccatttttttctttactaaaaaaagttaatgccaatgacacacaatttttttttttttttttttttttgagatggagtctcacttcttcgccctggctggagtgcaatggcgtgatctcgactcactgcaaagtctgcctcctgggttcaagcaattctcctgcctcagcctcccaagtagctgggaccacaggagtgagccaccacacccagctaatttttgtatttttaatagagacggggtttcaccatattggccaggctggtctcaaactcctgatctcaaataatctgcccgcctcggcctcccaagattctgggattataggcgttgagccactgcgccccgcctatgtatgattttttttttaattttattttcataagtttttggggaacaggtggtattttgttacatgagtaatttctttagttgtgatttgtgagattttggttcacccatcaactgagaagtatacactgaacccaatttgtggtcttttatccctcacccccttcccaccctttcccccggagtccctgaagtccattgtatcattcttatgcctttgcatcttcatagcttagctcttgaacccttactttctgtttgagggagaagacatatcatctacaagtagatactgtgtaaacattccattgcatgactatcccataacttatttattatttgtgtttggttatttgctgctatgtaacaaccccactcccaactaaatggtgtgacaattccatgattctgtggatcaaaaattctgaaaagtcaaacccaaggagttttgtctctgctccatgatgctaaagcctccgcaggggtgaggcgaatggctcagggtgactgaaaagctcagggttggaacagctggggatgaggcctctatgtataagatgattcttcactcacaggtctgaaactatggtggggacagccagaaggctcggctcagctgggacagtcacctgagccctacacatgacctctccaacatggtgatcctgaagcagttgggtttcttacacagcatcacacttttcttttttttttttttttttgagatgaaatattgctctatcacccaggctggagtgcagtggcacgatctcagctcactgcagcctccgcctaccaggttcaagcgattctcctgctccagcctcccaagttgctgggattgcaggcgcctgccaccaagcccagctaatttttgtatttttagtagagacggggtttcaccttgttggccaggctagtcttgacctcttgacctcaggcgatccgcctgcctcggcctcccaaagtgctgggattacaggcatgagccaccgcgcccggccaaagctcacacttcttatgattcagccttagatgtcacatcagttcattttccccacacttattagtgttagaagtcacaagcccacccatactcaggggactggcacacagaccccactctcaatggaaggggtgggacaccaccattcctgctgatgggcatttgggtaacttcctgtttgaagctattaagattgggctgctgtggccgggcgcagtggctcacgcctctaatcccagcactttgggaggccgaggcgggcggatcacgaagtcaggagatcgagaccatcctggctaacacggtgaaaccccgtctttactaaaaataccaaaaaaaaaaaaaattagctgggcatggtagcgggcgcctgtagtcccagctactcgggaggctgaggcaggagaacggcgtgaacccgggaggcggagcttgcagtgagccgagattgtgccactgcactccagcctaggcgacagagcaagactccgtctccaaaaaaaaaaaaaaagattgggctgctgtgactattctagtaggtgtctttggtgagcgcctacacgtgtttctctttttctctttagtatatgcccaggaggggaactgctggctcccagataccgtatgttcagggtcacacacacttccacagggttttccaaagcccttgtaccagcacgcactcccagcacctgtgtgactgctccagctgtcccacagtctcatcagttctattgctgatattttcattttagcttaagttatatttaataggaaaattaccgttgcctctgccccccgttcctgcctgtaggagtttctcgtagctgttgctacaggtggccacaaatctgtcacttaaacccacacaaattgatgtccttatggctttggagtcagaagtgtcaactgaaggtactagcagggctgtactgacctggtggcctcagggagcatctgtgctgcttctccaccttctagaggctgctgcatccctcgctccagccccttcctgacaccactcaccctcctacttctgttatcacatcctcaccttctctgtgttcagggctccctctgtctctctcttgcaagcacacttgggattccattgagggccacccacataacccaggagaatttctccacctcaatatccttaacaactgcagagcccttttgccataaaagttaccattcacgggttccagggattgtgacatgggtagctttaggagtgattattcctgcctgtctcccgctcaccagaacttggactttctctctcaacaggagccccctgtgtgggaatagcctgtctcaacgacgccctctataaggacctgcttcctcaaaggacctcatagtcgggtcctgcccctcagtgtccagtctgccttggctggaggggctgcaggggtgtgttggcgccacctggtggagacagggcatcacagcaggtgggagcccagtagaagcacaaccaaaacatgggtaatgtttaaaattttctggctaagcgctgtggctcacgcctgtaattccagcactttgggaggccgaggtgggtggatcacatgaggacgggagtttgagaccagcctggccaacatggtgaaacatcccctctactaaaaaatacagaaaaattagctggacatgtggcgcgctcctgtaatcccagctactcgagaggctgagacacgagaatcgcttcaaccccggaggggttgccgagatcgcgccactgcactccaggctgggcgatagagcgagactctgtctcaaaaaaaaaaaaagaagaggggaggcgaggggaggggaggggaaaagggggaatttgtttggagctgagacatccatcttctcctgacctcagatatttgcactcctggttatgaagccttcacacttggactgaatacaccaccagctttcccgatttccagcgtgcaaatggcagatcgtgagacttctcagcttccataattacatgagccaatttatatatataaattgggtcctccagaaaaacagaataaattatatatataattatacgcataacttaattaaattatacgtataacttagctatatatataatttattctgtttttctgaagaaccctactgacacaaatgttgagcatcttttcatgtgcttattggcttaataacttgtacatcttctttggggaaatgtctattcaagttctttgcccattttgtaactgaactattaatatttgtctttacattgttgagttgtaaaagttccttatatattctagatactagagccttatcagatatatttctgcaactattttctcctaatatataggttgtgtttttattttctttttctttttttttttattgagacagtctcactctgtcacccaggctggagtgcagtggcatgatcttggctcactgcagactcgacctgccaggctcaagcaattctcccacttcagcctcctgagtagctgaggttataggcacttgccatcgcacccagctaatttttgtattttttagtagagccgaggtttcgccatgttgcctaggttggtcttgaactccctgcctcaaagcgatctgtcagcctcagtctccctaagtgctggaagtacaggtgtgagccacagtgcccggccatctattttcaatagtgttttttgatgtacacaggtttggaattttgataatgttcaattcatccatttttttttttttttttttggttctttctactggaccaccactcttgagccctctaatccaacctccacgcggcagccagagggagctctctaaatgtaattactctttccctgctccacctgctcaaaacagtgtcacatttgtgatttaaaacagtatttctcaaacctaatttgcaaacaaagcaggtggaactcttcttgtatgcacagcatctgatttggttggtctggcatgggtctgggagtgagcacacctaccaagcggctgctggggtaacttgcgttttccactgatgatttcagcaatgtttccggtcccacatgctcctccagaaccttgtactcccccatgaaaaggtggagtccatttccccttcctttatttatttttttgagacgaagtttcactcttgttgcccaggctggagcgcaatggcgtgatctcagctcaccgcaacctccgcctcctgggttcaagcaatgcttctacctcagcctcccgagtagctgggattacaggtatgtgccaccacgcccagctaattttgtatttttagtagagacggggtttctccatgtcggccaggctggtctcaaactcccgacctcaggtgatccgcccgcctcagcctcccaaagtgctgggattacaggcgggagccaccgcgcccggctatttccccttcctttgaacctgatcaggacttgacgatggcatcaacatggtgagagtgaccctgcatggcttatgaggctgggttacacaaggcgatgttgcttctgactggctccctctcaggatacatgcccttggaacccatcctctaagctccttgggagcccaacttagcccatgtggagacaagacagggagagaaacagaggcacccccagccctcagccagcatcaaccgccagacaggagagcaaatgcgccaacaatgattccagctgaagcctcagacagcgtggagcagagatgagggatccctgcagattgcagatgcgtgagcaaaatgcatgctgtcactgttttgaaacaacaatgtctgggggctgtttgttatgcagcaatagacagctgtaacaatgctgttactgctgtattccatgaatgactgcactttgagtagcagggggctagatcactagataagccccatggcttctgtgtatgctatttttctacttttatatccttttcattcactttttttttttttttttttgagacagagtctcactctgttgcccaggtgggagtgcagtggtgcaatcttggcggactgcaacctccacttcccgggttcaagcaattattgtgcctcagcctcctgagtagctgcgactatagatgcacccccatgcctggctagtttccgtatttttagtagagacggggttttgccatgttggccaggctgatctcagactcctgacctcaggtgatccacccaccttggcctcccaaagtgctgggattacaggcgtgaaccactgcacccagcctcattcactttctttacttggctcatttttccttgttgcctcaattctcctctaagatcactttcctgacatttcagcctgggcctgttgccttctctgggtcccctccgcctcctgtgcctcccccatctcagccttgatccctcagattatacttcctctgtccccaccctgaccatcttggctgtccctggatagggatgggtatcttctcccactggtctgggagatctggaaggacaggcctggaaaagacttggtcactgctggaaggagctcagttagtgtggtgctgaggacagtacgggtgaggctggccccttcacccaaactcccactctcttccatagatttcacctctgtggcccaggccataggattagggcaactccccttaaacatcgagtccatcctccaagctgtccttttttttttttttttttttttttttgagacagagtctcgctctgttgcccaggctggagtgcagtggcgcgatctcggctcactgcaagctccacctccagggttcactccattctcctgcctcagcctcccgagtagctgggactacaggagcctgccaccacacccggctaattttttgtatttttagttgagacggggtttcaccgtgttagtcaggatggtctcgatctcctgacctcgtgatccgcccgcctcggcctcccaaagtgctgggattacaggcgtgagccatcgcgcccggcctcatgctgttcttgaatagtgagcacctgttacaagtcgccccaccagcctctcacttgtacccccctcatctctttctccccaagagacagaggaccctggcacttgtgaagcatgacccagaccctggggccatggcatccaacatcctcattccccatgacccctactgtctagatgtagctgccaagagacccccagactccccgggcctctgtctagagtgccaagacagagagagaatgccctgccgcttgcatgctttgtggggtgtccttcccccttccctggctgctaggcgtgacttcaacgttctccccaacccccaaacagcagcactgacaccagctgcagacctggctcaggttagctaatgaggaccaggctggggatggagcctgaacccctaaaccccagtcctgtaccccaccctaatcctggggtctccactggacaaaacgaagcagcttggtttttcgttgttattgtttttgagatagagtatctctctgtctcccaggttggagtgcagtggcgtgatctcagctcactgcagcctccgcctcccgggttcaagtgattcttgtgccgcagcctccccagtagctgggattacaggcgcgtgccaccacacccagctaatttttgtatttttagtagagacagggtttcaccatgttggccaggctggtctgaaactcctgacctcaagtgatttcccagcctcggcctcccaaagtggaagcggcttatttttaaggagaaaactcccgtggaaaggaatcagcacctcctctgtcaacatttcacttctctgaaaagactctcacttccaacagaaagtgctttgtaacacaacaatgaggctgggcgaggtggctcatgcctgtaatcccagcactttgggaagctgaggcgagtggatcacgaggtcagaagttcgagaccagcctgaccaatatggtgaaaccccgtctctactaaaaatacaaaaattagttccgtgtggtggcgtgagcctgtaatcccagctactcaggaggctgaggcaggagaatggcttgaacccaggagatggaggttgcaatgagccgagatcacgccactgcactccagcctgggcaacagagtgagactccgtctcaaaaaaaaaaaaaaaagaatgagaacatatggacacagggaggggaacaatacacacaaacaaaatttagaaacaggtgaaaataattttagtaatatttttactaatactgatatgctcaaaatattattatttcaataagtaatctaaaaattattgagatgtcttatgttcttttcatcatactaagcctttaatatttggtgtgtattttacactcacagcacatctcaatttgcagtccccatgtttcaagcactaaataaccatgtgtgtccggtggctaccatactggacagcgttgatctgaaatcgcatctgtatgcatcaccagcatatttgcagagatccccatctcagcagcacacctgaggctcatctgcgaaagcacctgcaacttctctacaacctcccacatcacctccaaacacatcctcatgtcatctgcaaacacacccatagctcacaggccaatgcctaaatatcattgcaggcaccttcagagaaagcacttactaaaggggtatacttgattccacatctgctttgacctgcaaatctcccttctcctttacatacatttgcatctcatttgtatgtcaatctaaatccactggcagagcctcagatcatcatctcaaagtcaggtggatgtggggctgggcaggcctccaggtgttcctcctcctgcttcctctggggctcttgatcctcctcctcttccttgctgctctcctcctcctcctccaatatggtgaccagttcctcccgcagcgcccccatctccagccccaggctgcacagctgtcccagcagctggacatccactcggcgcaggttcccctgccagtaggaaggggacgtcacagggatgccaccccagagagcaaggggtctctccaggacctgggtgagagcaggtcccaactcatgtcctggccacagcgcctgggcagggtcctcactgtgcccatggaccctaactgccttcctgcttctcagagtgtctcttgatctctaactcttctctttgtctctccatttcattgtccctgacttctctctctctgtctcctccctctcttatctatatctgtccctgtttccctttgtctctgtccccatttattttttgtctttccatgcccctgtctctctgtctttatgtgttgccatttctctgcccctgcctttggctctctttctctcgcttgccctctctctgccctccccaactttctcaaattcagtctgtctctccatctctgttcctgctctccgtctctgcttcccacctctgtccctctcttttgggatctccctgtccccacctctgttcccgtccctcactctatgtctgtctctcggtgtctgtacatgcctctcatgtctctgcttctatctctcagattctgtttttcgatctctggccttctctatttttgttcatttccattcattctcatttcctctctttctctttcccttccaaacccctcactcaccagctcctccctgatccacagcagactatcgcaggcacctccagtgtctgcccctgcagtcctgagggtctgaccagggatttccactggggagacctccctcagggcctgggggggtgggcccagccccggaggcaccagtccagcctgattcagctgcctccacagttccatcgtctctgagctatggctgcaaggagcaggaagtagcaaggtccagggtggcctggtcccctggggagctgtgtgcgtggtggagagtaaagggcagagggagtgggatgggggttcctgggaaaggtatcccaaagtccactcttcagagagaatcagctggccttgtgcttttctttttccttctgaagtctaacctcaactctgctcacagggttcaaacatagcctcttgcagaggtctaactccacccttccctgcctgtctcaggcctgacccctcaggggcgctcagtgtctgtagatgcctggcaccctctgtccttccacctgccccccaccaccacttctccagcctctcctcagcctccatttgacctctggcttgcccatagcttggtccttgcttgtcctcttggcacgggtcatcctagggctttcccaccagtgtgcctttgggggcaggaatggctcccaggggcaccaagacagcaatcccttagctggagtgcctgtgtccaggctgctggcctagggccaagcagccaattctgctgaccctggacttgcctatgggtatattatccctgttgagggtgagggcttctgctgtggaaaagtctgggaagcactgcaggcctctctcggccttggacccttccttcagacccaaggtgcatatatatacatatatataatggtagatcacgaggtcaggagatcaagaccatcctggccacatggtgaaaccccgtctctagtaaaacacaaaaaattagccgggcatgctgccgcgtgcctgtagtcccagctactcgggaggctgaggcaggagaatggtgtgaacccaggaggtggaggttgcagtaagccaagatcacgccactgcattccagcctggcgacagagcaagactccatcttaaaataaacaaatgaacaatatatatatatatgtattttgttttttgagacagagtctcgctctgtcatccaggctggactgcagtggtgcaatcttggctcactgcaacctccgcctcccgggttcaagcgattcccctgcctcagcctcctgaacagctggggttacaggtgcacgccaccacacctggcgaatttttgtatgtttagtggagacggggtttcaccatgttagccaggctggtctcaaacccctgacctcaggtgatctgcccacctcggcctcccaaagtgctgggattacaggcgtgagccaacgcgcccagccccaagtcccttttaccatagaaagtaacatagtcacagtgcccagggattcacaggtatggggagagggttcgttattcagctgccacacccaccttcctaaacctgctgcccttccagtttcctcacgtgcacagccacgcccgtctgcttttagtttctcaatctgttggcttaaccttcaaaacaggcccaggatttgagcacttctcaccattccctctgccccatccccattcatctcttgcctagactgctacagcagcctcttttactggtcccctgcatccacccttgccctctaaggcaagggtccccagtccctgggccaaggaccagtaccagcccctcgcctgctaggaactgggccgcacagcaagagatgagcagcgggtaagtgagcattaccgcctgagctccgcctcctgtcacatcagcagtggcattagattctcataggaggcaaaccctattgtgaactgtgcgtgcgggggatctaggttgcctgctccttatgagaatctaatgcctgatgatctcaggtggaacagtttcatcccaaaaccatccccaccccacccccgacccccagtctatggaaaaattgtcctccacgaaaccagtccctggtaacaaaacggttagggaccgctgctctaaggtacattctccacctggcagaaataatctttacaaaatgtaaatccgattttgacactcccttcttcccactgtgaatagaataaaaccctaccaggcctgcaccgtcagcccctgcccacctctcaacccagtctcctatctctgtctgcaagctggttcccacctcaaggcctctctgctctagaggctacctctccctgcagcgcttttcccctagatctttgaatggctctttccttatcattcacttctacttcaatgtcacctcttcagagaggcctttgctgatggccctacacccagtcacttttttttatctgcttctcatcaaaattgccttgctgattcctttgtttcttattcatcctctcccacatccatcctctcccagcccagaatgttgacttcctgagagagggactgggtctgtcctgctcaccatggtaacctcggcatctagaacagtgcctgccatcacgtggtaggtgctcagtaaatattcttggaactaatgaatgaataattctatccacaagacttcacaatggctcttcatgctgcgatctagctttcaactccaaactggtcttgagatctcacctcagtctctaaccttgacatctaacctcttcacccactctcttacctgaccctaatttttaaaaatgacgtggtcagcttttcagccccctcattccctgtttttaggaggtagtgagtggaagctggaagaataagaaagcttggggagactgcaattgcagtcaggaaagaaaggtactctgccgggaagaacaccccatcttctcctagggaaagattgtggagtcctggggtttgttttgtttttcaattttttgttttaagagacagcgtctcgctctgtcacccaggctggagtgcagtggcgcaatcacagctcactgcaacttcgacctccccggctcaagtgatccccccgcctcagcctcgtgagtagctgggaccacaggcgtgcaccaccacgcccggctaacattttattttttgtggatataaggttgccctatttctttgtggagataaaggctcccctatgttgcccaggctggtctcgaactcctggcttcaagcgatgctttcgcctcggcctccacaaagtgctgggttcacaggtgcgtgagcccgacctgtgtctcgttttgaagctcagggagagggcgctgtgagcaatccctaaaccctttaagagtaaaaagtgcgtgcacctttaagaggacggttagaaaacgcggggcgtggccacaggagaataagttcgcgctgaaccaggagcgtgggataagaccggccccttccggttacgaaaccttagcaagatggcggctccctgggcgtccctgcgcctggtcgcccccatgtggaatgggcgtatcaggggcatccatcgcctgggtgcggcagtggccccagagggcaatcagaagaagaaaaggacaatactccagttcctgaccaactatttctacgatgtggaggctctgagggattacttgctccaaagggagatgtacaaggtgcatgagaaaaatcgatcttacacctggctggagaagcaacatggtccatacggcgcaggtgcctttttcatcctgaagcagggaggcgcagtcaagtttcgagacaaggagtggatcaggccagataagtatggccatttctctcaggagttctggaatttctgtgaagtgcctgtcgaagctgtggatgccggtgactgtgacatcaactacgagggcctggataacctccgaacctccgcaggctggacatctcggacctccctgccgtgtccaaccctggcctcactcagatattggtggaggagatgctgcccaattgcgaggttgtgggagtcgactgggctgagggcctgaagtcagggccggaggagcagcctcgggacacagccagccctgtccctgcctagcctttagccctgtccccactcacgtggcttctcagcgggctgcatggaatgtctggtagctcaccacacttctggcttccatttgtcttcactcaacgtcagggtgggggagtggtgctggccaatcacaggagagagcgtgagttcccagtatttattcctggctgcccttggctaaaggtcacagctcctgtcaccctgtcaggcagccctttccatgcccctgttcaggcctggggaggtaaaggctcaggctgttagtagccgcagagagccacactcaccttgtcaggagactcttctcaaactgtccttatgtgagtgcactgccatttcttgcagggaccctgactgacacaggggctactactgacactttacagggatagtccccactacccacatgcatgcacccataa

SEQ ID NO: 735318 - DNA, 188467 bp, Homo sapiens
ctccaaggctgagggatgaggagacctgctgaggacccagggccttatctttccatcccactccataggtcccagtattgactgatgctgtcttcacctcctagcctcacttttaaccttctggcacccgcccaccactgtccagttcactattgaagccctgccgtccagtgctgcagagggaaaggatgttcttctactggcctgcaatatttcagaaactattcaagcctattattggcacaaggggaaaacggcagaagggagccctctcattgctggttatataacagacattcaagcaaatatcccaggggccgcatacagtggtcgagagacagtataccccaatggatccctgctgttccaaaacatcaccctggaggacgcaggatcctacaccctacgaaccataaatgccagttacgactctgaccaagcaactggccagctccacgtacaccgtgagtgattcccccatacctctgggtgctggcggtcagttctgcttcacacacatgagattgtcaggcctgggctgtgcctgcatccccctctgcattttgtcccgtgttgagatttgggcatttagtgcaggacacacacatggtaggtaaacttcaacagatcagaattcctttcctgcatccaggccctgcagacactgatggcgggggcgggggggcctcagcagggggaggtcagtctcagccaagcaccccatgccctccccatgaacctgaccctgagaaagaccctggagaactgggtcagggcctggcctgagggcgtcctgggaacctcacaaaagcccagcctcaggactcctgactccgtgtgaccccgggaagcctgtgtcagggctggggtgtggtctcctgggcagggcttactgggagcaaggatttaccagatgtctgcgggctgtggttcctgaagcttctcatcagtgagggctcagctcccagagtctcatctagacaaggacagagcctaccactttccctgggactcagcctggagagggcagggggacaggattactagggcattggccccctgaatgaggagcttaagagatgcccttgggcagtcagtggcccaggggtaggaacagaggggagaaaatgttcctggcagcttcttgtccaccggggatcatgcccaggggtgctctcccatggaggcaaataacagatgctgttgatgtgaacacctcctctgtgccaagcttcatgtcagatcctgtgaataatttaaagttcattcacagacaaagtggcaagcctcagaccattttccatttacatattgtatggaggggaaactgaggcacagagagatacagacaccggccacggtgggcagatcgcagctggcagagtcacatgagggctgtctgcagctgctgccacgtcctctccttcatccctggtgccttactaggtgtctgtggaccttagaacagccactggttcggatgttttcttcttaggtgtctacagctcggagggggagattctggtctggagagttatgagtaaatacagaattaatcagttttttcttaactaaatcacctgcctcaacaatcagtcagtgctggggaagttcaggcctcctcgctcaggtccacaccccgcatctctggacatgaaatggcttcgtgtgttttctgatgtgtgggtatcattccaacaggaggataaaggggaggactttgctttctctccccattcacaccctgcaccagccagggcccagtgtgagacacatactccgtagttctctcatgaaggagggagggaatgaatgaaggaatgatctataacctcttcagagacagagacctggatacaagatcctaggaggttctgggcccaacgtgagacacacactctgtagttctcttatgaaggagggagggattgaatgtaggaatgatctataacctcttcagagacagagatgtggatacaagatcctaggaggttctggccacacctgttttctgtccctctagagcctaagacccatgtctcattcatctggcccgtttctcctaaatctgcccctgggagctgagtctcatctgaccctggggctgcagggctgtgggaaggttttcaggggagggatcaggcttgcgggtagtcccacacgtttgccttacaccctggagctctacctggttctcactatgaatatcccataataatcccccctatcctttctggggagtagaaaaaaagtaaatatttaaaaatatgccagagcatctgttcttcttagcaagttcagatagttattagttagcaggaataaatcgttattttaccagagcctcacctgctgggggtttatgggagcctaactgactgaggggggtgggaaatatccaactccagccccctctagccatcatgtcccacctaaaggagagaaaaaactgagaggcacttgtgacattcacagcccagggcacagactctatccaggaccacagaacccctccctccccccactcaccaccgcatcactgaacgcctgctcacccaagttcctgttgcccagtacatcatgtcctggctttcaacaaaaactacaagacagactagaggcaaaaaaaaaaaaaaaaaaaatgcagttcgaaagacagaacaagcatcagaaccagatgcagatgtggcagggatgtggcagggatgttgaaattatcagaccaggaatttaaaacaactctggggccaggagcggtggctcatgcctgtaatcccagcatttgggaggccgaggcaggcagatcacctgaggtcaggagttcgataccagcctggccaacatggcaaaaccccgtctctactaaaaatacaaaaaattaggcaggcatggtggtgggtgcctgtaatcctagatactcggaaggctgaggcaggagaattgcttgaacctgtgaagcggaggttgcggtgagcctagattgtgccactgcactccagcctgggcaacagagcgagattccatctctaaaacaaacaaacaaaaaacaatactggctaatatgctaaaggctgcaatggaaagcatagacaatgtgcagaacagacggatgctgtgagcagagagatggacaggctaagaaagaataacaacagctactatatctatctatctatctatctatctatctatctatctatctatctatctatatatatgtatatatatgctagagatcaaactcactgtaacacctggatctcagagtggttgtgaggatgtttattaggagattaaagagattaaagcagagttatacacagggcgagagctcaactgatgctatcaactagtattcttatttttttgatgttgttattggcaataaaatcaggaacaatgcagtaaaaatttggttttatcatgtacgagttctgtgaccttccttgacttactgaggtactgtaagtctcagattctaactctgcagatggcggtgatgcccctctccctcaaggtgatgtgaggatgagatgagctgtaggtaggttggtgcccactgtgcctggcacatggaaggcccctgaaaatagtcaatgaacatcatccccgctcatcagcatggagttgacagtgagggctcgctctctgtgacaatcatggaatggaaaagaagaaacaagaggaagactgggcgcagtggctcatgcctgtaatcccagcactttgggaggccgaggcgggcagatcatctgaggtcaggagttcaagaccagcctggacaacatggcgaaatttcatctctactaaaaatataaaaattagcctggcatggtggcacaaacctgtaatcccagctacttgggaggctgaggcaagagaatcgcttgaacttgggagatggaggttgcagtgagccgagattgcgtcagtgcactccagtctgggtgacagagcaagactccatccaaaaaaaaaagaaaaagaaaaaagcaacagagggaagaggtgtgacatgagaggaagaagggatttaaaggtacaggagcagggcgaggtgcaagcacctgtgggagaatgtaggagttggtacatcccagtgtgtcaagtctgagacacagaaaatggtgcaaccgtggagagcaagggagtcagctatgaggacagcccaacagaccacactcaggctctggagcatttccttcctccctgactatgcccctgccctgcaatgccccttatggtttcccttggaacaaacttgggccttgtcccctttgccttcccctttctgcagaaaacaacgtcccaggccttcctgtgggggccgtcgctggcatcgtgactggggtcctggttggggtggctctggtggccgccctggtgtgttttctgcttctctccaggactggaaggtaccgcagcttttccccagcctcctcccacccctaggctgaccccagtcagggaggagggagaccccgccctgtattcagggccaggctttccgcatcctcccaaggaatccttccctctcattccatggctcctcccttgccagctgctgatcctaggctgcctcttcctttatgaatgtggcacagttaaggttgcacccctgagtgctgtcctagttccctaacacagcaaagccacagctgcctggagggaggaagggagggagggagggagggagataagacgggagtgctcagaacctggtaccttctgctgttcattgaatttacccacccagtgaggagggatttgcaggcttgagatccatggtgggggtcctgggcatggtcacgcagtggggagtggcaaagcctggacaggctgggtagggtcagcaccccatcgtgattgatgtccctgaggtgtgagatgggagaacctggacctcaggacctgctgtcctttatgtctcttgccaaggggtggagagagagaggacaaggccattgccccatttcagcatctccaggcctgaaaggagggtctggccatggcagggatactgagttctgggagaatatgatacatgctccttgcctccccatgcccccagctcccccagtgtcctgcacacacagccggccctgctttccctctggggccttgacccttcctctcaggcaaacgcaggtggtctgattccctccctgagtcctcagtccctttcctgggtccctgggtcaatgttctcctcacccggcatctgcctgggggggtccttcctctctggccaggacagacgtgactgcttaaggcctatcctcagctccccgtcctcggccgctcctaccacgaaactgatggagacaggaggccttcactccagtccttgaaaatggagtcccttccttgtcctttattctgcccctaaacctgtgatttctccctgcaccctcatgaataatcctgacctttcctagggccagcatccagcgtgacctcagggagcagccgcccccagcctccacccctggtgagtgtcccttcagcccaggtgtgggagcccctaggcctgccctacggtgtccactcctgccagtcaccccctgggggcctctgaccctttctttggggctgcaaggaggatgtcaggaaacatgacacaggggaccccgactgtcttgttcagactgatctgtgggctctgggtcgtgggtcacctcctcgacctcagctgctcaggtctcccctgggaagaggctccctctccctgattctctgggagctgaggacccctacactctcctgcaggaggggcccaggctctcctcccaccctgctgctcactcctgtctctgtccccaggccatggtccctctcacagatccaccttctcggtaagcctgttccctccccagcccttttctactggggtcccaacagtgcaggctcagggcagggggaccatcaaccccacagcacagcactgacccacctttccccagaacagtcaggtcaaagtgagtgcctccagccaggatccgggcctctctacagggccaggaccacccacgccatgtgctgacccctccccgggaccctctacacctgaggagaaccctggagtccagcaggtgcagaatggacactgggaccatcagtcagaggcccacattaacaagggtgcggggtgggcccagccaggacaggggtcagggtgttgtgtccacactgggaggctgagctcaggggcagagctggtcaatcctgaggggaaatgagtggaagtggaggcagggaagtaagtcctggccgatcagagacaggaaccttccaggctgggcttccgtgaccctccctccctgtcccctgacatctcctctctcccctgcccaggcccctctacccagccccagaacagccactcccatctatgaggtgagtgtgggccatggatgttctggtcccgcaggctccaggggacccaggatctgcccccaccagcacctggctgagctcagattcaggaaaatgcagtgaaaatgagaacaggtggtggtgagcagaggagggaggggcctgggaacagggaccccctgagcacagccaggttcagccccagagaagccctgggtgggcccagagcctgggagatgccagacactgttctgagaaggctacaggggttgaggcctcttctctgtttttacaggaattgctatactctgatgcaaacatttactgccagatcgaccacaaagcagatgtggtctcttaggttcctctgggagctgctcttgtgggttgatggagcgtccccaaagctcccagccctggggacggggaaggacatggagcctgagccagagaaccagctctgagtcctgaggagacacaggcctggggacagggagggatgggagtccctgctgaatatctggagaccctgacaggttgccctgggctctgggtgggccgggacaaaggcctctcatcaccacaggaagcgggggcttgcaaggaaagtgaatgggcctgtggcccacccggggtcaccaggaaaggatctgaataaagaggacccttcctctcattggctctttttctgctcacgggaacttagcagaaactcacctgaaactccgtgtccattctctcccgggtcacacagggaaaatatctccaccttgtctcaaccacagtctctcttccctgggaggcagaaataggggttgggagtcaggctggggtgggccctacacaggaaagggcaagattcacatgagccctgcccagccagccgagcgctcagctgtcctcacactaccccagggaccaaggccatgcacagccccagcctgggtccctctgtgaatgcatgtggggtctcaggagcacagaagatggggccatctgatgtccacaaaaggtgagcaatgcgggagcaaccatgggtggtataggttgcggctgtggcccctacgcagcctccagtgtcctgacccctgctgccctcttcacccaggccctggaggcccagtctatcactgtcctccacaaatgaacttacctgtccccaaatccaggatcctgtgtgcttatacctggccactaggttctcctctgtcccagtggctactgctcaggacatctttatccctggtggggcacagagaggggctgtcagagcaaccaagattaatacagacgcataattcagtccttgagcactacccaggactctggcccctcattgctcatcagttcccactttaccccctggcatggatctcactgagcaagccaactctttacacaggagcatccaggtcagaggtgcaggactcccccatctaaagctcatgcaggctcccatggcgatgggacaacctgtctgctcctctccctggcccacagccctatctcgcctgcagctcctccacacacctgggacagcagttctcagcccttccctgagggcccctggaagggtgatgatctcatataggttcacttgaaccaggtgccaccttcccacaagtgagctggtgcctgcactaaagcacagagccacagttcccaagagtgttctgccactgccacaggtcccaagagtgttctgccactgccacaggttgttcgtcctgagatgagaggtaagaaaacaacccgcaatgggttgttttatatcgggatttgcatcaggatttagctctaaatgacccctgatcccacctgcacacagcgtcagatgagacaaggtgaggcctctttagttttctgttgaggctgtgacaaattaccacaagcttagtgacatagaaacctgaaccaaagtgcccacatggctgtgttctttctagaggctccagggaagagtgcatttcctctccttttccacctcctagaggcctcctgcaaccttggctgtgtcctctttctccatcttcaaagccagcagcacagcatcttgaaactattctgtgccctgcttccatccccacatctccacctcctcccacctccctctctcacttaaaaggaaggagccttgtggttattttggacgcacctgggataaaccacaacaacctccccatctcatgatccttcctttaatctgtaaagtgtcctttaccacgtgacatgtccacagatctggggatgaggatgtacacatctttgagaggcccttgttctgtccatcactcctctcaaggccatcttctcatcatcgttcactacaaactacacatgggcacctggatgggttcatcatgactgtggcgtcagttcctgcattaacatccccagcaccctccagatcctgagagagggagacggagggctctccatgcccctagtacctctccaccttcttcttggtgacatgcttagttgctaagaataacagaaagcggaggtgactgaaagatcacaactcaccggcccttcaatagttcgtggacatcagcaccacggacagtgactcagtgaggctaatttccaggtggcagcagggagcatgcagataggagggaactgcaggaaaagctgcccattctattctatatgagaaagagtgtaagaaagaggaagctattacagggataatgctattcttctctaatccataaattgcgaaacctttgcatgtctggatatcatggtttttagcacatctgctgccactccctgcagggctgattgctgcatccaggatgtggtctcttggggggctcacagcctgctttggcctcatggtgagtctccctgcccctgacactcaggccactgtctctgcctacaacatggtgggaaccttccatgattaacgtctgattctctgtgcctgacctttgaagcacatccatcactcagcctggagcatccgctgagctcagcatcctgctcctccatccccagctgagcccttgaggagatgcttgagaggatctcctgggctcctctgtgagctcctccaggctgagccttgtgcttggtgtcagaggcctttgccatctgcttgttctttccataggcaaataatcctcctcagggacaagtggggcctgaagatctgtctgaatatctatctatctatctatctatctatctatctatctatctatctatcatctatctatatgtatgtatatatgagaatgctttattaggcaaaactgcatactatgaacatgctttaaaatgcaacaggatgagatgtgaagacataaagaacaagtgtgtagtgacacatggctatcagaacacactgaagaatccacaccgcggccgagagcagtggctcacgcctgtagtcccagcacttttggaggctgaggcaggcagatcacttgaggacaggtgttcgagaccagcctgaccaacatggtgaaaccccatctctactaaaaatacaaaaaatttagccgggcctggtggctcatgcctgtagtcctggctgttcgggaggctgaggcaggagaattgcctgaacctgggagacacaagttgcagtgagctgagatcgcaccactgcactccagcctgggagatagagtgaggctccatctaaaaacaaaacaaaacaaaaagaatccacactgcttccccgcttcactttacccagaaaaggaatgttctaggccacttcctcttcagcacacatccccagggaactaaaataggttcacagtcacccccatcttcctcattcccatcacctcttacccacagaggcatctctggtcctacagatccagccctgccttcaagaggcacaggtccaacccatccagtgtccctgctagtcacacacagcactcagggtacaatggagggcttctgtgctttggatgggaacaaaccccacctcacattcccacacctgagaagccaccagggtcctctctgtcctgtcctcacactcaatgtctgtcctgggtcacccttgtcatctctcctggaaataggcatggctcctgacaggtaggattgaggctttgtcttttcaggagtccctcccactctgagcacatgaaactgctcagctccatgcaaccctctctcaccaggggccttgttctctgggtccctgaatacctgggtccatgccatgtacattttaagaaaaatgacagtgactctcaccctgacatcctcacccaaggcacgtgtctgacaagaatcaccaggtgagatacctgtggctccacacacctgaggcttcactgcgcaggggtgtcctcatccctctcctcccacccctagggacagtaagcaccacaggctgccttggaccaccagctccccctcccagacacagcctcagatctatactgacatgctacatggagaggctctgatgaacagcaggtattaggaaatcccaccgaaccaggtgccacttgcggccccactcctcctcatatctgtgactgggacagacacacataacacacctctgttcaccgcccagcccccaaggtcaatcacagtctgcttctcccctagatccactgctccccatgtcttccgtcctcagctgcatcctgggtggcctccttgctgttcttgtaccccagaggcaggttccaacctttgtgatgttgcctgcaatgcccaaactttcccttccccttccccttcccttttcccctcccccttcccctccccttcccctccccacccctatcccttcgtcttcccttgtcttcccttcccttccctataaagccaaacatacccatccacctaccttgtggtcaaagtcatcagcctcctgctccactcagtgttctctgaccctgcatatggaggtggtggcccctcctagaacacccaccactcactgtcagccttgcgtggtaatcacagattttgcaggggttacctgtgttcaggtgtgtcacctgtggaaccagaactcttggaaggactggcagagggagctgcttaggatatctcagggctcctggcatctggtctaccacagggctattaacaacagcacttagggacaaggtggaggatggacggttaagagggtaaatatggatgatgtgtgggcaaagaataggacacaggaacacatgcagtactcaaataattatgccaagaaaggtgaggacatggagatggacattcccatatacttctgatgggactgcagtttagtccctacagcaacattgacctcatcatgtttaacgcgcacacgctctgaccactatcctacttctgaaggcctccctgtgctgtgagctctgagaaggccaagcttgcctgttctgtctctgctaaagccagagaccagccaatagcccagcacagggtacttcataaatacatgttgaaggaatgagctccaggaacagtactccacatggtagagatgtgtgtatgaggatgttcactgcagaaggtcatgtcaatgtgacaagtgacgagcagcctcaaatccagcaacaggggtgtgggtaaaagatcatagtgtagccatgcaatggaaccaatgaaaaaaccacaattagagcaaatccacatgtattaataaaggaggtgccctccatacatgctgcacctaacagaatgttgccaaataagaatgaaaaatgatgatatttgggctgtaaaaactagaagtcagctaaataagaatgcatcgaaagtatttgtgaatgcttacaattttataatgccttggcatccgttttggatggaagttggactttctcataccagaagcagggctcagtcacctttgaaatagtttccagttctccacctccttccagttcctcagtgtgattgatcagatatctgatttatacaactgcctcctggtgacctcctccctatgggacttccggatacagcccgtatgactgccccactgaccccacaccctgcctgctgcagtgaccacctctaattacctggatctcatgtctgcttgcattaaatccaccaattaaaactccctgaggacaatctgtttgaataatattctgtaccctaataaaggccttgacccatgggttccccctctgtcctccccatactgcccctgacctctgtgtgtgtgtgtgggtgtgggtgtatgtgtgtgtgtgtgtgtgtgtcctccagacagggcctgtatcccccaggacctgtaagtaataaatctttattttcatcttatgtctctcgcaatcattggcaagagctctgcatcttaaagatcgcaaatttaagaaattggtgtagtcggcacaatagagtacctcttctgtttagcacaagatatctcggagctgctgaggcttttaacatcctcgccggtgtggctgcctcactggtgaggccgttctgttcagtgcaattcagttgctccactgtgtgctgctgtgttgctgctgtagagtgctgccatgttgttctccccaaattgttaccgagtaggaacctgtaatgtgctcccaaggtggtctaccccatgagaagggggattctccatctagggcaagggctaggtgtgtttctggaatcctaatagggaaggcatccacagagggtgaactccactcctccttagagtgaggagtgacatttcccatttattttccccatggaggtgccatgtattgactttttctttcactgtcccaaggttgagccaaggtgagctatggagaccagggcaagataccatttctgttagcaaagcaaatgggtgacaacgtgtggagaagctgtggttctcctgatggatatagcagagtgccatttagtaaaatcttgtcaggaggctgcccctggttagaccggcagtgtctgtagtcactaaggtggatgcgaattttaggccctgggccatggataatccctgcagacacagccgtggcttcatgtgatggggcaatcccgggctagtggctcccttgtttctgcatttcttgctgtggttgcacaatcaacacctcaggggttgattgggtcaccttggaaagagaaacagctgcctaggaggctggtgcacatggaggccaccctcaattttattctgctaacaagttgtaagattaaaacaacagggggctttgggtaccatcaggaacttgtcaagtaaacatccaaagacagaaagaagaaaaagaaaaagacattaaccgtctagaaatacaagccattttaaagattttgcttaaaagatgcgcttgggctgggagcggtggctcacacctgtaatcccagcactttgggaggccaaggtgggtggatcgactgaggtcaggagttcaagaccagcctgaccaacatggtgaaacctcgcctctactaaaaatacaaaaaattagcagggcatggtggcaggtgcctgtaatcccagctacttgggtggagaatcgcttgaacccgggaggcagagacggcagtgagccaagatcgcaccactgtactccagtctgggcgacagagtgagacttcatctcaaaaaaaaaaaaaaaaaaaaaaaaaagacgggcttgtttcgtcgttgtggagtcatcccagagagaggctactccctagagtcactgaccacctttcctcctccatcttttcctcttatcattctagagacagaaaacaagaatctcagctttaggtggctaacctcaccccccaagaaaagaaactaccactttgattgactacaaatccaagaaaaataaaagagaaactttaaaaagtactgagcaaaccacaggtctagcaaacataatgctagccctaggttacttattcatttacaacaaacccctagatataggaggaaaaaataaaaggtaattaaatatatacacatacaatattttaatataaatatataataaatagttaaattatgtatgtataatatgtaactaaatcaaagtaaaatttcatactttgattctattggaaattcaaaattcatttattaacttatatattaaggaatttatgtaaaaaaagatttttaaaagggcaccaatttgcttttgtgtctctacaacataggatctaatttaactttacatttgctaaatacactaattgacaaatattcatggatttaatcaatactggggctcaaattgtagccacacgtgggaatcccataaatttaaacactctgtccctattatcttgagaagaaaactaaatataaaattgaaaaaaacaggtatgtctcaatttacctgtaactttgcctaaatttcccggagtcatatacccattgctgtaaaacattctctattggacataggtgctctgagacaataaataaaatagaagtgtttttggtacttagacattggcttgacaaaatgggatcccatgaaacctcagttaagatagtgaatacggcccaatgtgagttgaaatggggcctttaaggattaaaacttattacatgaaacctagtaagtaatggggtgattatccatactgcttctccatttcatagcccaattttgacagttgtcaaatctggaaaaaacaaacaaacaaacaaaaaaacccctgggaatctgttgcctcacagagacacaaagtagacatcaaaattgtatatctcagttccagttccaaaatggtggcatagaagcaagctggctttactccttcacacagaaaaccaaaaacaaatatacagcaccaaaattattaccagatatattccagaactcaaatatgaaaatgaaacagttttcagagccacagagaagtgaaaaaaactcccgacagatgacaaaagaatcagatttccccatctgtaatgtccctccctgccccattctgcctggtaccaggtgtgtggaaaattttaccccaactcatggtttctacactgggaaatgtaagatcaatgcgggcaaccagtttctgcacaatcctgggttccctgtccctgccttaacccacaagaagcattgtgagtgcccgaagggagaaatttccctgaggacagtcaaagagtggggaggcaggactaccatctccttccctggaaactctgctgtgtaactcagccaagggagacatgaaatcagactggtgtttcagcagctccatgttgtagtaggtttgtttcacaggtatcctgggcatggacatctagccagctttcccacactgccaggatatcccctttgggacctccctcagttaggaagggcacactctgatcatttactagggccaaggtaaaccctaaaggtaacttagagatgaaaaggaggtagtgacctagcagtaaagaactctaagaaaatctatccaataaaaatcaaaacaagccagacaaagactaaaataaataatgaatccttcaatgtaaagacctggacttacatccacaagaaacagtaagcaggtaaccatgatctccccacatggacaaagtgaggaacaagtgactgatcctgatgagatggtgatgtgtgagctctctaatcaagaattcaaaactgcagttttaaggaaactcaatgatcttcaagaaaacatggaaaagcagttcagaaatttatcagagaaatttaacgaagggattgaaataatttaaagaaaacaaacaggaatcttggaattgagaaatatatttgctgaacaggaaaatttattagagtctctcaacagcagaatggatcagaggaaagaatcaacccaaataagactcccccaaggcataaaataatcgaattctcaaaagtcaagggcaaagagaagattttaaaacagaaagagaaaagaagcaaatggcataaagaagctccaattctgtggcaacagattttcagtggaaatcatacagaccaggagggagtgacatgacattctcaaaatgctgaaaaaatattgacatttgagaatactttatccagtgaagttatccttcaatataaaggagagagaaagtttcctagacaaacaaaagctgagataattcacaccatcagactagtcttcctgtaaatactaaagggtaaatactaaatacttcaatgtgaaagtaaaaaaaaaaacactaacatgcaaaacaaccacaacaacaataacaacatttgaaggtataaaatccactggtgaaattaagtacgtagacaaacccagaatactcaaatagtaattgtggaaagtaatccaatcataactctagcatgagtctcaaaatataaatctatcaaaaacaataatacattttaggaggccaaggttggcagattccttgaggtcaagagttcaagaccagcctggtcaaaatggtgaaaccccatctctaccaaaaaatacaaaaatttgcagggtatggtagcacatgcctgtcgtttcagctatttgggaggctgaggcaggagaattgcttgaacccaggaggtggaggttgcagtgagctgagattgcactactgcactccagcctgggtgacagagggagactctgtcttaaaaaaaaatagctacctgtttggagaaaggtaatataaaatatgtaaatagagacaaagtcaaaatttgcaaaggatgaaattaaagagtagagtttttttggggggttttctgtttctattattttatttgtgatctaagataagttgttaccttttcttctcttgaagatactttgttatatctatgtttttggaagtcttatggtaactgcaacgcaaaaaatctatgatagatccactgaaaataaaaaacaatgacttaaaacatactaccagagacaatcaaccacaaggaagacagtaaaaaatgaagaaaggaagaggggagttacaaaacaaccagaaaacaggcaacaaagtggcagtagtaagttcttacttaaaaatattgaacactgaatataaatggactctattctccaattaaaaggcatagagtggctgaatgctgcctatatgctgcctacaagaaaccacttcatgtaaaaagatacaaatagactgaaagtgaagggggtggaaaaagatatttcatgcaagtggaaaccaaaagagagcaggagtagctatactgatatgagataaactacaaatcaaagactataaaaagagacaaagaaagtcactatgtaatgataaagcgctcagttcagcaagaggagatgccaattataaatatctatgcatccaacacttgagctcccaagtctcccaagtatttaaagcaaacaatagtggatctaaaaggagagatagactgaatacaatattaattaggggactttaacaccctgctctcagcaatggccagatctttcagacagaaaatcaacaaggaaacttcaaagttaaactacacactagatcaaataggcctaactggcatttacgggacatttcactaactatctaactgttacagaattcacattattttcatcagcacatagaacattcttcagaacagaccacatcttaagtcccaaaaccagtcagaataaattcaaaaaagtttatatcacatcaagcatttgttctgaccacaatggaataaaactacaataaatgaataactttctggacacatacaacctaccaagatggaagcatgaaaaggcagaaaaacccaacaaaccaacatgaaactgtaacaaaaggaaaacccaggaccgaatgacttcactgctgaattctaccaaacatttaataagaactaaaaccaattctactcaaaatgctttaaaaaattgaagaggatggaacactttcaaactcattctacaaggtcagcattatcctgataccaaaaccagacaaggacaggacaaaaacaaacaaacaaacaaacaaacaaacaaacaaaaaaacactacaggattgcttgaggccaggagtttgagatcagcctgggcaacatagtcagaaccaatctcttaaaaaaaaaaaaaaagaaaaaaattagccaggcatggtggcatgtgcctttagtcctagctactcgggaggctgaggtgagaggaccaattgagcccaggaggttgaggccgcagtgagccatgtttgtgtcactgtactccagcctggggaacagagcaagatgctctctcaaaaacaaaaagcaagctgggtgtggtggctcctgcctgtaatcacagcactttggaaggctgaggtgggagaactgcttaagcccaggagttcaagaccagtctggacaacatagggggactccatctctcaaaaacaaccaaccaaaacaaagccaaaaaagaacataggccaacatcactaacaaacatagatgtaaaagtcctcaataaaatattaacaaaccatgtttagaaacacatcaaaagagatcattcactatgattaagtgagattcatcccagggatgccagtatggctcaacatatgcaaatcaataaatgtgatccatcacattaaagagaaccaagaacaaaaaccatataatcactccagcaagtgcagaaaaggcatttaataaaagaatgggttgagggagtggagcccatagtcagagcagcagtggtctgggattttggaagtagaaagaagggcagcaccactggccaggaccaccagggaacacccccataggccctgggtgttgtgctccagggagggttccctctggagttattaatcttggtgtccactttgcccagctgcccctcacagggtcagggaggatgaagggaaagcttccttctaatgaaagttcagggactcacagttcctagagcctgtagggagaggaagatcttcgaggaagagcacctgggcattggggcgtttgagaggaagatctatgccaggtccaagtggacaacctgtggactctctctccagggacatacgggtatctgggaatctcctgtagcttaaagaggtaaagacctctccctttagcctgaggactggaggatgctggttcaggtgaatgagtcctgcaggggctggtacaggcctggagggtggtggtgtccagggccttgggttcacccttagcatgattcaggccgggcggtgtttcacatgagcaagagggcctgggttcattgcttcaggacaatggtgaaatctcatggtggaagaaatcttgtccttgccagtgcccagctttcatttggtcttggcccagagtgtcctccctagagaagactcttgtcccttcttcacactgcccttcagggatatgccagccttatgggataagatggggtggagactgtagatgtgggtgggaatctctccacagagtgctccttctctcagcggttgcaccttgtctcagggcttcagcttgaaatctgggatctccaagcccttccctccccagtcctggccaggaccacatgggcagatgcattgtgtgaagtgcatttcatttggggtgtcctctctgcatggcaccctcccgttgattctctttgcgcatgtcagagtgcaggcaccatccacacctcctgctggaggagggacggagctgttgactcctgagagctgatcatgtgttcccaccctcacacacaatcatggtccatcctctgagggacatgtgttgccaccactgtggagatggtgcaactgacagtaacaaacagtaaaatctggtactgaatgggaccttaagccaacaatgacaatgtcattccaaggtgtttcatttttattgattcaatgcaagtcacctgatttcattgactattcacaatagctcgataaagtaaatgcatcatcaccaccactttaaagaggaaaaaggtgcttgggcagtttgtgactactgtggtggctgctgcattgctctctggtaaagccaagtaggtggtgggtgcggcctctgggctgggatgatccaccctcctggtggtggcaggggagccaagctggagccatggcctgtgcagtggtagcagctgaactgaccgctgctgcaggatttgcaagctgttacattttgcgaagccatgaagcacataaaacctcaagtagaacaagtgtttcaaagtctaccaaaatctgccttcagagattattactacagaggtggatatgaacccaaaatgacaaaacgggaagcagcattaatactagataatgaatgaacactagtaatagtagggtaagccctactgccaataaagaaaaaaataagagatgctcattaacatgttatgctcttaaatcacgcagacaaaagagggtctccttatatagtagccacaatcaatgaagctaaagatttactgcaagatcaagctaaaaacagtaggtgtataatgaatttttaacttcatattagtttatgtatatgaatatcaagtttttataataaaatgcctccaaacaaagaatatttgatttagggtttaataacttctaagaggggactcagatgtttcctgtttcacagtcagtctgagagggtcatttttcctggagctgacctgggtggaggcctcacactgatactccccagcatcctctctcctgatggggtttatgctgagcatacagtggccctgggacagctccattctctccatgagtcacagacgctggtcatggaagatccactggataaggttccagagtcatctgtggggcaggtcaggatcacaacatccttttcttctgtgactctggtgttgctgactcagatggggtcggagccactgaccctgtggacaatcagtggaggtgctcaactgaaagtgggctgagggcacgtcttctcctccatccctgggtccttaaggtaactgtggaccccagaccaactgacacaggagctagaaagaaattatttaggaagttagtgagggtaagagcgtccttggcaaggtttcccctttaacaaaaagcagcccaagataattccttttctaacaaagagcagcctgaaaaattgagctacagatgtagatgagcaagatggaagcttgcacaggtgaattccagtaggtgtgccaatagaaaagggctgcctggaagccaggtatgttcaacatggagactccatcctcccttttctccattaccacatgtacagtaaaaaaccaggcaacatggcaccggccaggtagacaatccatctgcatgacaaaagatcagagtggggcagccagcaaatggcacagctggtctaaacaatctttcaccccctgtataaatcagacactgcctcctgaagctcatctataaaaccttctgcatttcactatggaagtggcaacccattttccccaggacccctctctctgtgcagagagctcttctctttctttcccctatgaaacttccactcttaacttcactctgggtgcctgcatcctagttttccatggccatgggacaatgaacctcgagtattaccccagatgaatgatgctgtttcacaatcactggttcagctcccttcttcttagggtttcacagctcggtggggagaataccacgcctcagtggtctggggagtgaggaacaaatgaagaattaatcagattttacttagaacgctatcacctgcctcaaccatcagatccatgttgggaatgtccaggcctcctctcttagatctatacccacttcactggacctgaaatcctgtgtttcccgatgtgttggtgtcactcctatgagaggataaaggagagaactttgctttctctccccactcacaccctgcacaagacagggcccaatatgagacacacactcgctcagtagttctctcatgaaggagggagggagtgacctcgagtgattctgccatctgtagtctgtgtaccctggccagtggctgtatcttcatatgcctcagtttcccctcagtaaaataggacacacaatgagaactaaaaataaaattctaattccccagtgaactgaaaggatggcctcttggccaagcggatcccagagttcctgatcatgacaggatgggaggttacacctcattacagcccctccctttggaagtttagaggtgacaactgactagcattaacgctaaaatcgagatcatgagactgacagaacagactctctgtggccataagataccaaattataaactcaacctaaggtcatgcaggcaagggctaagccacactttcctacatttaaagaataagctatgttctaacacagaattttctttctctctagcggctaaagtaacactagccttcgagataagcaatattgaaatgatcgcggctcatccaccaacactggctaactgacccctgttccaacagccacaactacacttcaattggacaggagactgatttcagtaactttctcctaataagagaccactgagcatggcctggttctgctggtatacagacacggtgcactgagtaccataatgcttgtttcatcttttgatgtataagacctaatttaatacatttaaatctgaattctccaccccaaagtgaacatggggtgcatgtagcatgcatgtttgttgatcacgcatgtgcgtgtacttcctttgtgagtatccatagctccacctataacctgttgaatatgtatacctggccaactcattcagcataaatctatcttccacattcccctcccttgaagtgcctgctattggtctctgctggaggctgcatcttctaccctggggaatggccagcctgcaggctgtaaccctgtgtaagaaataacctggttgggtgcagtggctcacacctgtaatcccagtggtttgggaggttgaagtggtagaatagtttgagctcaggagccagagactagcctgggcagcatagcaagatcctgtctcttaaaaaaattttagggaggagagtgaggatcagaaaaaatacctattggctattatgcttagtacttggatcatgaaataatctgtataccaaacccctgattacatatataacaaacctgcatgcgtatctttgaacctaagataaaagtttgttttaaaaactatctgggtgcagtggtgcatgcctatagttccagctactcgagactgaggtgtgaggagtgcttgagctcgggggattgaggctgcagtgaattatggtcccacctgtgagtagccacttcactcaaacctgggagacagagcaagaaccggtctctaaaaaaaaataaaaatagaaaaataaaatgaaaaatatatgaaataaagtctcctttccaaacgtacagatctccgatttttctgccaacaatgataaatggtcagtggcttgccatgttgtctgtgaattacttttaaaatattcacgatcacctgacctaaaggttggtaccaaggaaccgcctgaatacaccgtctctgattatttgcctccaacagagtgttccctgggcctgatctctggtggacaatgagctgctgggaacatcctctcttctctattcctcccctggggatgctgaccttcccttggagtctcctaagttccccagggcagtcggctaatgtcctagggagcttacctgtcttctccataccaagtctcatgtgaaggacgaggctttgcccttgcccagatgaggctctgggggctgagccctggctggctaccagctgcaagagccatggcccttggacagctggtaaatccttgttcccagtcagccctgcccaagatgcctcaacccagccccggcacaggcttcccagggtcacatggagtcaggatcctgggacaggggactggacaggggtttccagggctgagtttctgaacaggggcttcccaggggtcccctcactccaggatctgacatggtcctacaaggaacgtccatggggaggggacccaggagggggaactgacactgacctccccttactgagcctccccccaaccccatcagactgtccttcctctgtagcaagtgcctgcagggtctggatgcaggaaagaaattctgatctgtggaagtttgtctcccctgtgtgtgtcttgcactaaatgtccaaacccccaaatgggatgtaatgtagagggggacacaggcacagcccaggcctgaaaatcctgtgtgtgtgaagcagaactgacccccaacacccagagctcatgagacatcactgtgtacgtgaaactggccagttacttcttcattcacaagatctgtttttatgacttgtagggtgtaggatcctgtgtcattgttggtgacattctgtatcagcagacatgtattggggtatattgtctctcagcctctgtggcaggtcctggggtaattacttgagttcctagtacatatcctgtaattcccctttgtaccagttgtagccaagcctaaggcagattgtgggtgagtggaagaatctccttgccttctgcagcttcaacagtgacttgggcagtggtaggcaagttccagaaagttaaaagtgaggctaggagtggggagagagcatcagttaatactgggccctatgcattgaggtggaaagatggggccctaggtcctggacaggtctcttcatccctcagccttggagtgtgtgtgtgtgtgtgtgtgtgtgtgtgtgtgtgtgtgtgcgcgcgcgcgcgtgcgtgcgtgtcctactgggccaaggtcagcagcatgacctcccttccttcagtgcctctgaccttggcatttccctgtttggagtccttttccccaggggtctgcctggctccctccctactgccttcaggtcctgctcacattagggcatccttgggagaccccttccctgacacctctagagaccctgggtcttccctttctgacctttcgctgctgtgttccctccagggctcttgtcaatacttgacctcacattctagatacccttgcatgtctgtcttcctccctatgagagcatgagctctgtgagaacagggacttgtgtgatcttggttgcaccccagtgcctgggacaggctgcggactcctgtggatgagctcatgagtgttcccagggcccttcacaacgtgggatttattttccaatggctgaggttgttggctaagagctctgttggagttcaatcaggctggtgggaaaaatattagagatagttatagagatagacacaaatcttcttggaagaccaaaaagtttgcataactttggtaatagatctgactgaaggtggtccctttacctttagttaaacaaattaaagtagtaacaaaggaaggcagagtagtttgtctagccagcttgtttactcatgtgatcttaagactaaccattgatgtgccacaggtgcttaattgctttctacttgggaagtccacaatgtcaattaccctctaacggtgttgactcaagcctttgttaattaatcttactgaataaatatgagtctcactagctgatcaaggccatggtcacaactgtttataggactcagcagggagtctgtaagcggccctgacagactcagctggactggcaaagcaaaatatgtgtgtgtcagtgtacactattcacccgtcccccacagctggtgcccctatatgaggagtgctgccacagagctctgtttagtgtcccttgttttttttcttgagtattaccccaacttaaattgtgattattgtcatctgttttcaacattaactgctcagtgatgattcacttggaaaacattaacaatcgagattgtttcttcactaacaacctcagattatttagattttcctgttgtaatcccttcttcctgtttagtgtccaacagaagccctctgtccctctcaggtccccgttctctccaagaaaccccagccagtctctgtgctccctcctcccatccactcccagggagccctcccctcacctgtgagcagaagcgcctgccagggatgtgcactctgtgaggaggggctgagggaggccccatgggctctgctgtctgctttgtcctcctctgtggagaggagcttgggcttcagaaaataaggaggccagaaagtaaggaacaggctgagaaataatggggatgtgtcgaaaggtcacagatgccaacatctttgtcctatgcaatattatccataaaattacaggtttgagatatgcttaaattttcttctaacatgcattaaaataaacatataacttttaatagttatattaaattgtatttaatataaattaaatgctcttgtcagagctactgtgactgtcagctctgctgtccttcctctctctgtgctaagcctcctcccagggcagaagcacttcccagggccaggggtgggggcggggaaaggtaagtggcaatgaggatctgcacaggtagcctttccgcctcctcccctctcagtcctgcctccttgtcttcttttcctctttttctccaatctacatttcagttccttagaccacgctgtgagaagcaaggcttattgggacccccatcccttaacaggatgacctgtgctccccataagtgacctctgctgtgtctagggattggctctgtcagcacctcacagagagtccctggggcccccaaactcagtgttattttctctatgacacagaaacccctctgggtatgcaaggttttcctcatgttttctaatgtctgggaaggttggatttactcccagcagggaggtcacagagatgtccagggagtggggtcctagaaatggacaaatctagagctaaagcccaggtctacgattttcagttgtttttttctgcagtgctatgtgaccctaatttcctaggagtaactaaaatgcaaacctcagacatttgtagacattttatgatttttctctacagcttgtaccactgttattattatttgctttatgctttttcctaaataaatttactttacaaaacatccttgtcctagtagggtgcaggggctcacgtctgtgatctcagctgcttgagaggttgaggtgggtggattgcttgaggacgggaatttgagacaaaacatctttgtcctatgcaatattatccataaaattacaggtttgagatatgcttaaattttcttctaacatgtattaaaataaacatataacttttaatcatcatattaaattgtatttaatataaatttatatacaatacatttttatataataaattatatatataaatgtatatataatagtttttcttttttgagatggagtctggctctgtctcccaggctggagtgcagtggcacgatctcagctcactgcagcctccgccttctgggttcaaacgattctcctacctcagcctcccgagtagctgggattacaggcgcctgccgccacgcccagctaatttttgtacttttttagtagagatggggtttcgccatgttggccaggctggtctcaaacacctgacttcaggtgatatgccgcctcggcctcccaaagtgctgggattacaggcatgagccaccatgcctggcctatatattttatataattatataaagttttctataataaattttatataataatatataaaatggatatttatttaagataaagttattagttttatatatttacatatatttaggaataaatgtgttactgtgggagcccagtgcccaggcaggtagtcagtacatgatggttgtcattagggttaatactttggaattctggattttttcccaagagagtgtctacgctggaatattgggcttgtggctttctgctgatgtgcatgtgtgaagaagctacttccacttattaggacttgtgtatctgtctcgcagtttcactacctattttctcgtgatgttggtcaagtcgcctaacttttctgtgcctcatttacctaatttgtagaatatgggtaacagtacacaagtgtgagtgtgtatttcccaggactgaccactagagggcgtgaaggcaccggcacttactattacagcaatgggtgtagtagtgctcatggtcgtaaacatcattctcccatgaaaggaaccagggcttcctgggagaaataactgattccagggctggggccggaaagcacaagcggagcctggagcatctcgtgaggccagaaagtaaggagccggctgaaaaataatggagatctgtcgaaaggtcacagatgccaaccagaaggagctttgaatgaccaattttgagacaaaatgagcactataagaaataatgatagtaataaattccaacccataaatacccatgagttcctactaatataaataaataattgaatacataaatatataaggatgaagaaacagctttttcttacagcagaattccaattaatgaatgtagaaggaatgatcaaatagaaaatcactatttggctaacagcacagtcaattgtttgtaggcaagaattatcaatggactttaaatatgaatgggtaaaagtatgatgatgctacaactagtgagtaccaagggggaaaaaaaagtacgttgagaagaaacaggctacttccatattcccaaagtatcacttcaggagctacttattgattataatgggacaaatagtaacttacagtagagaaacctggcaacagagtctctccgaggtacaaaggctctcttcaggaaggaggtaaggggaaggaagaagaaaacactgtcctgcctcaattatttgctttccccattctcaagtgtacttcatagacattcaaagatatgtgttgatagtgtccacgatccacatggctctattatagtcatttattcacacatacattcagtgaggctttgagtgcctaatgtgtgcctgatatttgctagatggtggatgctgagaagatcaggtgtgctgctgtctctagggtgactgaatccacctgccccactttacagatgtggaaattaaagtgaaaaggatttataggattagttcactgtcacaaggtcactagccttaaagttacaggagtaaagcaagtttcctgacttgctagattttctgctgcaggtgctgacaatggtgagctccaataggagagaggacactcagagtgaagtgggagccctgaacaccctggattagccaagaggacatgccgggtccagctgtgaccgcacaaaggaccattggggatatttgtattctctttttcacttagagcttgaaatgaggaaaactaagtgcagaaaaccaagagtggaagatttttcacaaagcactggtaacatgcatcagaaaaccctgtgctgatgtctgtcacggtgtttctcactgaacggtaatagtctggctttgagtgtgttccctctacagcctggagttctgcgaggcagggaccaggtgtgattcatctttgtctctccagtgacagtacacagcaggctctgataaatatttcttacaaaataaaatggaataaaaagtagacatctgcacaggtgtgggatgactgagcagcagcagaagcaggaaaagtcagcgtccccagatcagctgatgtggtgttcggattctagataggggtgaggtgccaggatggggatgggggtcctgtggctctgctgccctgggggacacccctaggtttcacagtgcctgctgtggttgctgcactttgcttccccatgggaaagtgatcagagggtgtggggcttcaggtgaccccatgtgggaaatggccaagggaaggtggggtgggcggcacatggttttttttaaccaatatttgaaggtaggttgtatgaaaaggtgttaggcttatttcagcttatggggagtaggacagggattggtgagtgtgtatcaggtatattttggctcaggatggaaaagaactgtcacagtaacataaggtcttttgggaaattacatgtttactggcagagttcaggccagggctgggtgtctgaaaatacctgtcagggtcacttttatggttacaagggcagagcttggcttggaaccaggtttcttactaataccacatattaagtattataaaaactgtcctttgcaataggacattgctctatgatgcaggttgaggtccctctgtttaagtaattgtgggtggctgtgattctctcatctagtctgcgacttggacttcacctccatctgcagtccctctcctttgctgttgacactggtcagagttaagcgcatttactgacgatggtcacagggtggcagcactgcctctctggtattttctaaaacctcttcctggaactgagccagtctaagaggatgtcatgactaagaaaagggcactaatgaggtgaacagataattttttttttcttgtttctcctgtgaagtaacagagtggaggtgagcatggaataattgccttttagaaatggaagacaatggagagaagtgtttcgcaaaccttaatgtgttcacagatcccacacagatctttttattcaatacagattctgatttttctggtgaggcctgagattgtgcatgtctaaggagcttttggatgatgccattgctgctggttggcggaccacactttgagtagcaaggctcgaagatcatttagaggttaattctcactgcatctaatttatggatgaaaacaaaccaaggtccagagagagcatatacagcttgcctaacaaagccattccctaagtgcctgacttcttgcatttaaacccagggcttcagcctttgtccagttctcactccacacatcacacggtttgttcactgttgtgaacgacagttgtggcagcatctctttagtttaggaatccagagccccaatttcactaccctctttggtcttggctcatgctgtgacttcgaatagttttgcccttacttaaaatcttcagtggctcttttgtaatcacaagatcaagttcgaatatctctgtctagtgttcatggctttataacatatggtatctctttagtaaccttacctaacttccctgttttaaaattgtctcttgctgccatagccctccttgctccttcctgctccctaacaaactgtgttcacttctctctcagtggtagtgatgatggcatggcctctgatgttagactcatgtaacttctaatcccagatccaccaccaacattggcaagttgattcatctttctgaggataagcatcctcctctgaaataaacttagatggcggttgagaggggtaaataaaataacacacaaacccactctcatccctgagaccctcttcaaaactagcatataaaaatagctatttgaagaggttcagtgaaattcaaggtaacacagagaaggaattcagaatcctatcagataaatttaatagactgaaataatttttaaaaatcaggcagaaattctgtagctgaaaaattcaattgacaaaccgaagaatgcactaaatctttcaacagcagaattgatcaagcagaagaaagaatttgtgagcttgaagagataatatatgaaaactcagagtcagagagacaaaagaaaaaagaattaaaagaataatgcatgcctacaaggtttgattattaagctactcaaagagatacaagagaagggtgaaaaccaacataaagaaatgtaaaaaacaatcagaatataaatgaaaaattttctaaaatgctagctagtttttttttgagacaggctcttactctcatcacccatgctggagtgaagtggcacagtcatggctcactgcaggctcaacttcctgggctcagatgattctcccacattagccttccaagtagctaggactaaaggcgtgtgccaccaggccaggctaattttttgtatttttagtagagatggggttttgccatcttacccagggctggtcttgaactcctgggctcaagtgatccaggagattcactgccaaaaaggatataaccaagtcatatagtcataggttatctaaagtcaatgtgaaggcaagaattctaagagcagtgagacaaaagcatcaattaacttataaaggaaaacctatcagtctaacaccagatttctcatcagaaaccttacaaaccagaaggtattggggtcctaatcttttggcttcttaaacagaatagctctcagccaagaatcttgtgtagagtgaaattatatttcaaaatgaaagagagaaatacagtctttttcaggcaagcaaatgcttcaggatttgtcacggctagaccatcctacatggaatgttaaagggacttctaaatcacaaaacaaaagatttaaatagaacagaatagaacctcttgaaaccaaaaaattcaaatggcctataaaacaataacacaataagaaaacaaagtagataacgatcaacatgatgactggaacaaatattaacattgaatgtaaatgacctaacactccacttaaaagacacagattggcaagataaataaaaaatcacaaaccaaatatcagctgtcttcaagagactcacttaacatgtaaggattcttatagactcaaggtaaagagatgataaaagatattccatgcaaatggaaaccataagtgagaaggaatagctatccttatatcatataaaacagactttaagcaacaacagtaagaaaaagacaaataaggcaactatataatgataaaaggatcaatcaaacaagaagatattacaatcctaaatatatatgcacctaactttggagctcccacattcataaaacggttatgatgagacctaagaaaaaagatcaacacaaaacagtgagggtgtcctgggttttctttttattggacagcagtgtactagcctatcactttcccagtcaggggatttttggtctccccattcccctaccatgggttcatgccaaagtccatattttttattagtgtttggaattggattttttttttttgaggtggagtctcgctctgttgcctaggctggagtgtagtggcacgatctcggctcactaacctctgcctcctgggttcaagcaattcttctgcctcagcctcctgagtacctgggactacaggtgcatgccaccacacccagctaatttttgtatttttagtagaaacgagatttcaccatattgtccaggcttgtatagaactcctgacctcatgtgacagggaaacaggcactcagtgaacttcatgcgattgaggagttaatgataatgagagaagggctgtgaggggacagcactggggacaccagagcctgtgacgggctgagttgctgtgccttgggagatgcccttttgactgagccctgggaaggagggggtgtgggggcaggagctgcctgcagagggagtggcctcaggtgggcggccacctggctgcagggaagaggtgacagagttcgtgtgcagagcttggagggtgaggaggaggtgggttgaggtgaccttggtgagggtgaaccatggggggctgtgggccctgctgagggaggccagccagccctggacctacagggtggtttggtcttttttgtcccattcccagcatccactgagtggtgaaactctgcaggccagggaccatcccactggccagaaggagcgcacagtaggtgcccactcagtgcatgttgggctggacagaacctcactctgccccctgcccccagctttgggagctgcagcaaggtccctccccctagggatctccatgcctctgtctctgaggggtgagatggggagacttcaaagggccatctcagagtgtgggggatagagacgcagaagtgtgggggatagagggaggcctgggctctagacccaaaggaccttacacacctcctgagtcttttcaaatggtttcttctgttactttaaaaatgatgtaagtcatcatatttattgtaaatcccaggaatctaatcatgcgtaaaataaggtgtcttatccttgaccccaccccttccccaattaaatttccaggatgttaccactgtttgcagttggtgtgaatctctctttaataatactctgtttatctcacttgtcgttttacgccaaaatacccattgaattatattattgctgaagaccattcttttttttttttttttttttgagatggattcttgctctgttgcccaggctggagtgcaatggtgtgatctcggctcactgcaacctctgcctcctgggttcaagtgattctcctgcctcagcctcctgagtttctgggattacaggtgcacaccaccacacctggctaatttttgtatttttagtaaagacagggtttcaccatgttggtcaggctggtctcgaactcctgacctcatgatccaccctccttggcctcccaaaatgctgggattacaggcatgagccaccacacctgcccagaccattctgttctactgaatcatgtgtggtgggcacctcttatatcaatacatatggattttatcttgtgtttgttattggctcccctttttctcattgcatggctacactcaatgctttgtccacacccctgttcctgggttggaatcttgtgacagaaaatgaagtaacaaaggctaaagctttctaaagtggagtcaggagattgcaagacaattgcactttcaccagcaagagctcaaaccacagaatgttccaatagatttggataaacagctgaagtcagtattcaccagccttcaacatctcaactaggagaaccctaaaattaactaagcacatagaatggaatggacttgtgatttaggattccttctcagccaatgagctgcttctgaaaacaactttttgtggaaattacctgtaaagaaaaccctctcctgtgcttgtcttacagaacactagtcagggctgccctgattcagtggacccgaattgctattatttgtttcctaaacatatggtattttctgtgaccttcatctcaatcttttttttaagttactgggctgtttcccagttttcataatgacgagacattctgcagtgtttcatacacatgtcttttccccatgtggagtattgatccaggagctcattcagtcaacgcatgtttatgaagcatcctgtgccaggctgtgggctggtcactgtcttcagcagagagaggacaggcacagtcttgccttcacagagctcacagctcagggaggctcttagaagtgggatactggtcggagcatgtgcacattaaacatgatgaggtcaaggttgctatagggactaaaccacagtcccaccaagatcgcattgagttcctgtggtagaccagaggtcagggcccctaagatgtcctgagcagctccctctgctcagaagttttggttccacaggtgacacacctgagcacaggtgacccctgcagaacctgtgattaccacccaaagccaagagtgagtggtgggtgttctaggaggaaccgtcacctccatgggcagggttggggaagactgaggggagcaggtggctgatgactttggccagaaggtagggggatgggcaggtgtgcgctcatagggaagggaagagaagggagggcattgcaggcaacaacacaaaggttggaacctgccttcatggactgagaaaagcagggagtccacccaggctgcagctggggagggaagacatggggagcagtgggtctaggggagaagcagactgcgattgaccttggggactgggcagtgagcagaggtgtgttatgtgtgtctgtccccatcatagatatgaggaggggtgaggccgcgggtggcacctgggtcggtgggatttcatagtgcctgctgttccctagagcctctctgtatagagggtcagaatagatctgaggctgtggtctgggggaaggggctggtggtgcttaccatctctaggggtgggaggagagggatgaggatgcccctgagcagtgaagcctcaaggtgtgtggagccacagttgtctctcattagacatgtgttttgcgtgaggatgccagggcctggtggttattactgttgtcaagtttgcatgacaaggacccaggtatccagggatccagagcacagggcccctggtgaggggatgaggctcagatggggctgaccaggttcatgtggtcagagtgggagggactgatggagagacagagcctcaacccctcctgtcaggagctgtggctatgtccaggagagatgacaaggatgacccaggacattgagtgagtcattgagacattgaaggtgaggacagggcagagaggaccctggtgactgctgaaatgtaggatgtgaggagggctctgacccatgcaagttacaggacctccccacccccgagcccacagatgacccttaaattgggcatcctgagtgctgtgtgtgcccagcagggacactggataggctggacctgagtctctgtaagggcagcgctggtctgtaggaccagagtcttctctgtgggtgtgacgtgggcaggaattagcaagatgggggtgacaaggcttggcttggaggatctggtacagaagcccatgggcttggtcagctcagcttctcaggggctcagctggggctggaggagcaggatgctgtgctcagggcatgctccaggcagcgtgatgtgtgtggttccagggtcaggcacgggggtcaaaaattaaccatgaaaagttcccaccttctgtaggcagagaaaatggcctgattgtcagggtcagggagacttaccatgtggccaaagcaggctctcagcctcccagagaccacaccctgggtgcagcactcagctctgcagggtatggcaatagatgtgccaagaaccccaacatccagatgcatgcaaaaattttgcgatatataaaatagagcagatcaagtttccctgcaataacgttgttcctggttgtgtctttttcttgtaaactagacatggacatctttccagcagtctgttctcatctgccaccttcctgctgcagcacctcagaatgaacattcctgagacactgtccgtggtgctgacgaccaagagctatggaacagagtgtgatgtagaatcttctagttacctctgctctcctttcacttttaacaacagagcatcattaacaatgagaaggtggagaggtgttcaggatcttgaagtgacttctgtcttgctctcccataaccctgaagctgctgtagacattattgcagaaactgacaccacagtcaggatggccttgtccaggagcccatgtgcagtttgtagtgagcaaggatgagaaaatggtcttgaaaggggtgatggacagaacaggggcttttcaaaaatgtcacatcatcacccccagcatccgtgaatctgtcacatggtaagagaccttacagattaaatgaaggattatgagtttggaagattattgtagtttatccagatgggtccaacataatcacagaatcccttccttacaaatgagagagggaggtgggagagtcagagaaggaggaggagatgtggggatagatgcagaagacagagcggtgtcaagatgctgcactgctggctttgaagatggagaaagaggacacagccaaggatgcaggaggcctctaggaggtggaaaaggagaggaaacgcactctgccctggagcctccagaaagaacgcagccatgtgggcaccttggttcaagtttctgtgtcacttagcttgtgggaatttgtcacagcctcaacaggaacctacagaggagtcaccttgtgtgcaggtgggatccagggtcatttacagctaaatcctgatgtaaatattgcaggttgcttttcctacttcctatctcatggccaacaaccctggacaatggcagaacacccttggaaaccacggctctgtgctttagtggagggaccagcttgtttgtgggaaggtagcacctggtccaagtgaacctacatgagatcgttactctccccagggccctcagggaagggctgagaacagctggcccaggtgtgtggaggagctgcaggtgaggcagggctggaggggcctgtgggtccaggtagaggggcagacaggttgtcccatcgccatgggagcctgcacgagctttaggttggggaaccctgctcctctgacctggacgctcctgtgtggagaggaggcttgctcagtgagatccacgccagggggtaaattgggaactgatgggaaatgaggggctagagtcctgggtagtgcctgggaggaccttgctcaaggactgaattcttggtctgttcccaccttggttactctgacaacccctctctgtgtcccacggggataaagatctcctgagcagtggccattgggacagaggagaacctggtggccagagctaagcatccaggatcctggatttggggacaggcaagctcattgctgggggacagtgatagatacggcctccagggcctgggtgaagagagcaggagggctcaggacactggaggctgtgtggaggtcacacccacgatctgtaccacccatggatgctcctgcattgctcacctttgtgtggacatcagatggccccaacttttgcactcctgagacatctcatgcattcacagagggacccaggctggggctgtgcatggccttggtctctagggtagtgtgaggacagctgagcactcagctggctgggcaggactcctgcgaatcctgccctttcctgtgtagggtccaccccagcctgactcctaaccccctactcctgtctttccagggaagagagactggggttgagataaggtggagatatttttcctgtgtgacccaggagagaatggacatggagtttcaggtgagtttctgctaagttcccatgagcagaaaaagagccaatgagaggaagtttcccctttattcagatcctttccaggtgaccccgggtgggccataggcccattcactttccctgcaagcccccgcttcctgtggtgatgggaagccttcgccttggcccacccagagcccggggcagtctgttgaggtctctatatattcagcagggacccccatcccttcctgtccccaggcctgtgtctcctcaggactcagagctggttctctggctcaggctccatgtccttccccatccccagggctgggggcttcagggacgctccatcaacccacaggagcagctcccagaggaacctaagaagccacatctgctttgtggtcgatccagcagtaaatgtttgtgtcagagtgtagcaattccagtaaaaacagagaagaggtcttgacccctgaggccttctcagaacagggtctggcatctctctctgggcccacccagggctactctgggactgaacctggctgtgctcagggggttcctgctcccaggcccctccctcctctgctcaccacctcctgttattttcactgcagtttcctgaacttcagctcagccagatgccagtggggacagatcctgggtctccctggggcccaagggaccagaatatctgtggcccccactcacctcatagatgagagcagctgccctggtgctgggtaggggaatctgggcaggggagagaggggtgtcaggggacagggaaggattcctgctgtgtaggaattccagggctctcctcaggtgatggagggtcccagggtggggttagcacagggagtggatgatcctggccctgaacagaggcccagctcatggccagggcaggtctaaccttatccaagtcattctgggtagggtgggtttgtgctggggattgacagtccccctgccctgagcctgcacagctggggccccagtggaaatgggattgggaacggacagtcttacctaggagatggagctgtcagagggtccatggcctggggacagagacaaaagtgagcacgagagtgttaggatagctgggcccctcctgcaagagtgtgtgggggtcctcagttcttagagaattggggagagggagcctttctcaggttattttaggggtcaagtaagcaagtgaggttgaggaagtgacccatgacccagagcccggaggttagggctgacccggccagttggggtttcctgtgtgatgttttatgggatcctctttgcagccccagggatagggtcagaggcccctgggtgtaactggcaggagtggacaacttggggctggcttagtagttcccagccacacccagactgaagggacactcaccgggggtggaggctgggggctgctgctccctgaagtcactctgatcgctggccctaggaaaggtcagggttatttgtgaaggtgcaaggttaaaagtcacaaattggagttaaaataggggaccaggaaaggagcctatttccaagaggggtatggagacctcctttctttatggagttctgtggtaggaggggcccaggtgaggggagttgaggaaaggccttacaaagccacatctgtcctggccagaggggaaggactctcaggcagatgctgggccaggagaacattgatccagtgacacaggaaagggactgaggacccagggaaggaatcagaccaccaggggttgcctgagaggaagggtcaaggcaccagggggaaagcagggccaggcacatgtgcaggacactgaggggactgcatgcatcttggattctcctggaactcagtgtccctgctgtgaccagacactccactcagggctggagatgctgaaatgggacaatgatcttgtcttctgtctctgccctttggcaagagacataaacgacattccaggatatgccatattggggccccggttctcccttctcacagctcagtgtctgcagttaccatgtcagtcaaaggggtgctgaccccacccagcccgtccaggctgttccagtctccactatgtgataatgcccaggatcccccctcagatgccctctcactgggtggatggattcagtgaacagggggaggtaccaggtattgagcaccgctcccccctgctccaggcagctgtggctttgctgtgctaggaaactaggaccatgctcaggggcatggccttaattggactgaattcactgaggacaaagctgttgaggaagcagcccagggtcagcagctggtgaggaaggtgccatggaatgagagggaaggatccctggggagtcgggaggctggggagagcctggcactgaatacaagacagggtctccttccttctcgcctggggtcagcgtgaaggatgggagcagaatggggaaaagctgtggtacctgccagtttttcggaggagcaggaaacacacaagtgcagccaccagaagactcccaaccaggaccccgatcaggatgcctagagtgttgtcatctgctgaaagaagaaggcaaaggggatgaggtccaaatctgttccagggggaaccatgaggggccttgcagggcaggggcatggtcagggaggaaggaaatgccatggagcctgagtgtggtctgttgtgctgtcctcatagctggctcccttgctctccgtggttgcaccattttctgtgtcttaggcttgaattactgggatgcatcaactcctacattctcccacaggaagcctgcacctcatcctgctcctgtgttttttagtccctccttcctctcacatcactcctcttccccctgtttctttttttccatcccatggcagtcgtaaagggcaggcccttgctgccaactcaatgctgatgagcagggatgatgttcattgactgttttcaggggccttccacatggaaggcacagtgggaatcaatctacctgcagcttttctcaccctcccattgccttgagggagaagggtatgtgatattgtgaaatacgtatttggtgttcatcaccattgatatggttaggctctgtatccccacccaaatctcaccttgaattgtaataatccccatgtgttatgggagggaccttgtgggaggtaattgaatcatgagggtgggttttttccatcctgttcttgtgatagtgaataagtctcaggagatcagatggtttcataaagggaagcttccctacacatgtcctcttgcctgctgccatgtaagacatgcctttcaccttccatcatgattgtgagacctctccagccatgtggaattgtgaatcaattaaacctctttcttcatacattaccaagtctcaggtatgtcttcattagcagtgtgagaatggactaatacagtaaattggtaccagctagtggagtgctgctataaagatacctgaaaatgtggaagtgactttggaactgggtaacaggcagaggttggaacagtttggagggctcagaagaagacacaggaaaaaagtttgaaacttcctagagacttgttgaatggttttgattaaaacgctgatagtgatatggacaataaagtccaagctgaggtggtctcagacagagatgaggaacttcttgggaactggaacaaaggtgactcttgttatactctagaaaagagattggtggtattttgcccctgccctagagatctgcagaactttgaacttgagggaaatgatttagggcaactggtggaaaaaaaattctaagcagcaaagtgttcaagatgtgacttgggtactgttaaaaacactcagttttatgtatttacaaaggtatggtttggaattggaacttatgtttaaaagggaagcagagcataaaagtttggaaaatttgcagcctgatgatgcaatagaaaagaaaaatccattttctgaggagaaattcaagccagctgcagaaatgtgcataaacaatgaagagcaaaatgttaatccccaagacaatggcaaaaatgtctccagggcatgtcagagaccttcctggaagccccttccatcacaggactggaggcctaggaggaaaaaatgtttcctgggccaggcccagggctcccctgctgtgtgcggcctagagacttggtgccctgcatcccagccactccagccatggctaaagagggccaaggtacagctggggccatggcttcagagggtgcaagccccaaaccttggcagcttccatgtggtgttgagcctgcaggtgcacagaagtcaaggattgaggtttgggaaccttcgcctagatttcagaggatgtatgaaaatgcttggatgtccaggtgaaagtttgctgcagaagcagagccctcatggagaacctctgctagggaagtgttgaagggaaatgtggggttggaaccccgacacagagtccctactggggcactgcctaatggagctgtgagaagaagaccacaatcctccagaccccagaatggtagatccactaacagcttgcaccatgcacctagaaaagctgcagacactcaacgccagcctatgaaagcagccaggagtggggctgtaccctgcaaagccacaggggtggagcccaaggctatgggagttcagctcttgcatcagtgtgacctggatgtgagacatggatacaaaggagatcatttcagagcattaagatttggctgccctgctggattttgggcttgcatggggcctgtagcccctttgttttggccagtttctcccatttggaatgggtgtatttacccagtgcctgtacacccattatatctaggaagtaactaagcttgcttttgattttacaggcttataggtggaagggacttgccttgtctcagatgaaactttggacttggacttttgggttaatgctggaatgagttaagactttggggaactgttggaaggcatgattagttttgaaatgtgaggacatgagatttgggaggggtcgggtggaatgacatggtttggctcttcttcacccaaatatcaccttgaattttaataatccccacgtgttgggggaaggacccagtgggaggtaactgaatcatgggggtggattcttcccatgctgttctcatgatagtgaataagtctcacaagatctgatggttttagaaaggggagttcctctacacatgccctcttgcctgccgccatgtaagacatgccttttgccttctgccatgatttcaaggcctccccagctatgtggaactgtaagtcaattaaacctcatttttaaaaaaattacccagtctcaggtatgtctttatcagcagccaagaccagctcggtcgcggagatcctaacccagcagtgctagaggaattaaagacacacatagaaatatagaggtgtgaagtgggaaatcagggttctcacaggcttcagagctgagagccccaaacagagatttacccacatatttaataacagcaaaccagtcattagcattgtttctatagatattaaattaactaaaagtatcccttatgggaaaccaagggatgggccgaattaaaggaataggttgggctagttaactgcaacaggaacacgcccttaagatgcagattgctcatgctattgtttgtggcttaagaacgcctttaagcggttttccaccctgggtgggacaggtattccttgccctcattcctgtaaacccataaccttccagcttgggcattagggccattatgaacatgttacagtgctgcagagattttgtttatgaccagttttggggccagtttatggccagattttggggggcttgctcccaacagactaatacacccattttctggtatgtgactctaaagtccttagaatcttcaaagtgatgtctttttcaagctaataattgactgatgactggcagcccctaggcaacttcagaatgaggctggtcactgacccaggtaggattagagggttgggactttcagcctcacccctaatccctggggagggacctggagtttgaattaatcaccaatgaccaatgaatcaattaatggccaatgattgaatcaattaatggccaatgattaaatcaatcatatctatgtcatgaaccccaaaaggactgggtttgaagagctgaacccatggaagtttctggagtgtggtgcatctggggagggcatggaagctccacaccccttcccacatgccatgctctgtgcatctcttcatctgcatcctttgtaaagtcctttattacaaaccggtaagcctaagtatgtgtttccctgagtcctgagagctgtttgagcaaactaatccaacccaaacagggagtcatggaaacctcaatgtgaagccagtcataagaagctctggaggcccagacttgtgactggtgggaaggtggtggcaattttgtgggactgagccctctgctgatatgtccaggtagatagtgtcaggatggaattggaggacacctagctgatgtacggtgcagaactgattggctgctgggtgtgtgggagaaacccccccgcatcacatttggtcacagaagtgtgtctgtgttgatgattgttattgtggagtgagagcagaggaaaaacacagtttgagtttttccaaacagggtggaatcccatctgccaatttagaatctgaaacttatagtttcagtacttcaattaagattgaagtacttcaattcagtacttcaattaagattcagtacttcaattaagattcagtacttcaattaagattacagaactggtaagtgaaagtgatacaacaaaaatgtaaccaaagtctgctcaacttaacagctaataacaacaaagttcataaaaataataccagtcgatattgatagcactgattgagccctggctctgtgcatgaccttgttaagggctttaatcgcattaatctctgaataaatatcctcacaaccaccctgagatccaggtgtttgtaacaattctacagatgaggaaactgaggcccaggaggttgagtgtcttgcccaaggtcaaatacctggtacctattgtaaccaggatgataactggatgagtctaatccctgagttcttacccacattgctccccaggctctgaaggaatctcatccttctcattccgtgtatcattttacaccccccctccctcctaggaaaatatacaaggaaaggagtgagaggggccgagggtcactcacattttacagtcagcttgagggggtcgctcctgttggagctgactgggttggagacctcacactgatactccccagcgtcctcctgcctgatggggtctatggtgagcatatggttaaaccaggacagcttcatcctcttcgtgacctgcagacgctggttgttgaaaatccactggaaagaggttccagtgttatttgtgtggcaggtcaggaccacggagcccttctctgtgactgtggtgctgctggcttggatggagggctgagccactgactctgtggatagagtgaccaacagaaagtgtcttggggccatgctgcatcctcagagatctcagagtcaaatttagaacattctcctgtgaataaaggagaaagatgaaggacagggaggagcagagagaaccagagacacccatagcagcgagcagtagggactacagtgacctcagagaccccagggaccaggaggacccagctgcctcagaccaggaccagggagccctgaaaaccctcccacagatgagcggccccagagtcacatgagatgcaatacctggggtggctttaggagcaggcagtcagagaaatggaacatgggtctcagcccctaagggacaaggaagaggtgtggccagctcctcctaggatcctacatccaggacccagtctgtaaagaggttatgattattcctttcttttttcattaattccctccctccttcatcagagaactactgagtgtgtgtctcagttgggccttgtgcaggtacagggtgtagtgggaagagaaagctgagtcctttccttcatcctcccatgggagtgacatcaacaaatcaagaaattcatgatttcacgtccagtgagggaagaaatgtggatctgatgggagaggcttggacaatcctggcattgagtctgatagttgagacaggtgatttcgttctaagtaaaaactgactaattctccatttgcccgtcattcctcagaccagaatctccctctctgagctgaggatgcccaagaagaaaggagctgaaccaacatctggtcctggggtccacagatgccccacggtggtggccacgaccagattctgggctgcagacacacggtggtgtgacgttgagcactgacagcctgtgtgatgctgatgcaatttctctttaataaaatggggtaaatgtcaatggtccctggcttgccatcctctctgtaaattaacattaaaatatttacaattacctgacctaaagcttggcacagaatagctccaaataaacatcatctattattattttactccaaaaaaaaaaaaaaaagagttctctgggcctgattcctggtggagaaggagcggtccagagtgtcttttctctgctttccctcctcctgaggacagtgcacttcccgggacatcttttaagtttcccatccagtttaatggcctgggaagtttgtttgtctgtcctctccactctgactctcaggtgaaagatgaggctctgcccttgcccagatggggctctgggggctgagccctgcctggtgaccagctctaggaaccacggccctgggacagctggtaaatcgttgctcacaatcagccctgcccaggaagccacaacccagccctggcacaggctccccagggtcatctggagtcaggatcttgggacaggggcctggggcaggggcttgaagggctgagcttctctcagaggatcctcaggccaggccctgactgagtcctataagatctttctcaggtcatgtctatgaggaggaggccaagcggggttggactgagactgattttcccccgctgcatctcccgcatcagactatccttcttgctgtagggaatttccacggagtccggataagggaaaggaattctgatctgttatagtttgtctcccctgggtgtgtcctgcactaaatgcccaaaccccaacatgggacgtaatgcagagggggatgcaggcacagcccaggcctgacaatcctgcgtatgtgaagcagaactgacccccaacacccagaggcacggaggaatcactcaccgtatacacggagatggtgagatgcctgttcaatctgagaatttctgtatgtgacttgtagggtgtagtatcccgtgtcctctagggtgacgttctggaaatgcagatctccactgggtgatattgtctctcgaccgctgtatgcaggccctggagtcctaacgtgagtgtctattacatatgctgcgattagctggttgggctccaccgttttccctttgtaccagccatagctgtaaagattctcgggcagataaaccacagagagatgaacattctccccttcagcaacttcaaagggcgctgatgcaataaagagccaggcagtggtgggtgcgttccagaaagttaaaagtgaggctaggaaagggagagaatatcagtcaatatttgacctatgcattggcatggaaagacggggtcctgggtgcaggtctcttcacccctcagccttagagggtgtgtgtgtgtgtgtgtgtcctactgggtcaaagtcagcagcatgaccctcattccttcagtacctctgaccttggcatttccttgtgtgaaccctctttcccaggggtctgcatggttccctccccactgccttcagttcctactcacacaagggaatccctgggagacttctttcgtgaagcctcctctagagaccctgggtcttccctttctgacctttcccagctctgttccctccagggctcttgtcagcacctgacctcacattctagatctctttgggtgtctgtcttcccccccatgagattgtgagctctgtgagggcatggacttgagtgatgttagttgcaccccagtgcctgggacaggctgcagactcctgtggatgagttcatgagcgttcccagggccttccatatcctggggtttatttgctaatgtctgaggttggcagatgaagacagagtttcatgccctggtggtgtttttatttaaattgtcactgtgatatagttttactatcattttcaaaatgtagtggccactgacaatgaacttgaaaacatggaccaactgagattgttttgccccttggcaattccagttcacttagattttttggttctccttagacgctctctcccctgagtctctaacaaaagccctctgtctcctctcagagccccatcctccccaggagaccccagccagtctctgtgctccctcctcccacccactcccagggagtcctcccctcacctgtgagcaagagcccctgccaggggatgcattctctgtggggacaagctgaggggggccccatggtctctgctgcctgctctgtcctcctctgtggagaggagcttgggctccaggaacgctctagacagggttactgtgactgttgtctctgctgtccttccttcctctatgctgagcttcctctcaggcaggagcacttcccgtttatgggcaagggcggggctctgcctacaatgtctctctgtcccctcccctctcagtcctgcctcccttgtccctcctttctccttcctttttgcctatatttggttccctaggcaaaactttgagaagcaacgctgatggggtcctcataacaggacgacccactctccccagtactgacctctgctgtgttctggccttggttctgtcacagccggtagattatttccctttgtgacacacaaaaccagctgggccctgggtctcctcatgctctccagtgctccaggaaggcagaatgatgcccagcaggaaagtgacagaggtggctctgggggctagaaaggggctcactgggtgatggctgggaaggacccacccgctatcttcagtgtcaccagcctggcctctgacccagggacagagacccaggcctggaggtctcgggaggatccccagctcctaggtgtggagggaggtgtcctgtgtgtcctgggaagagaggactttgatggaaggaggtgggaggctctgggttctgctgtccttggtgaaggtttcagggggaccctctccatgtctggggtctgtgcccccagcttaactctcattctctttgcaaatacatatattttgtggatctgcagttgcctgaactgtctcatgtccctaaatctttgtatccctttttacagaaggtcaggaagggtgtgtacatgagtatgaggactatctgatcagggcgagtgtttgtttcccaaagatctctttagatatggtataatacataagataaatgtactgaattagcaattttaagtgtagaattaaatgatactaattctattcacaatgttgtacaaccatcaccataattttttaccagaaaatcttcattataccaaatggaaacttcatacttttaatcaataactccccacttccccctgccccacccactggtagcctctgatactatcaatctctgtgaatttgcctagtttacatgtctcatataataaggaattatatacgtgtattatttttttctggattatttctcttagggtaacacttttaagattcatccacgtcgtagcatatattacagcttctttcctatttatggctgagtaatatcccaatatatgtttatacctcaattttaattcattcatctcttaatggacatgtgggtggtttccacatttttgctattgtgaaaaccgctgcaatgaacttacacttggaagtatctgtttgggtttctgtgttcatttctttgggggtacatataggagtataaatatggggtcatgtggtagttctatgtttaagtttttgagaaacagccaaactgttttccagtttgctgtgctattttatattcccatcagcaatatacgagggttccattttctctacattcttgtaaacacttactatttaatattttttaaaacttatagccattctagtaggtgtgaagtgatagctcattgcagttttgattttcatttccctggtggctgatgaagttgagcattttttcatgtatttactgacaattttaatattttttagagaactatttattcaaatcatttgctgtttaaaaaaaatgggttatctttttattattcagttgtaatagttctttatatattttagatacaagtcccttatggggtacatgatttgcaaaatttttctcatattctgtgtcttctcactttcttcatggtgttctttgaagcacaaacatttttaactttgatgaagttcacttatctatttttaattttgttacttatgctcttgatgtcatattgaagaaaccattgcccaatccaagatcattaagttttactcctatatgttcttctaatggtttgataagttttgctattccatttaggtttttgaaacattttgagttaacttttgtatgggctgtgaggtaggggtctaactacactatctcgcatgtggttatccagttgttccagcacaatatgaagaggctaccattctttccccattgaggaatcttggcacccatgtcaaaaaccaatgggctgtaatggtgagggtttatttctggactcttgattctattccattgatctctatgtgcattcttgtgccagaagcacactgttttaatgattgtagtgttttagtaagttttcaaattaggaagtgagtcctccaatttttttttccagattgttttggccattctggggtgacttttaaaaaagatgtagttcaatggttctcaaagcaggagtggttcagctctccttttttggcagtctggagacctttttaggaccttaatctaagtagataaattattcccactttcttttctgagttgctatgttacagtgtatattgacacccatgaaataattgagagaccctggaagtgcttgcctacatagtgagggacaattagttccatgatcatgggcacagaagattttgttttgggaaacaattttgttggtggagttatattcatgcttactcttttatttgtcttcatagcctgcatctccttcagacttcatatctgtttattttcttgtttgtcctctggggtttgggtgttgggtgaccagtcagctggagctggaggaggtgcttagcaaggcagtgaccctggttgggaggagcagggctcagcagggtgaaagtagctgggccttgagtcaggagtggcatctggaaggcctgactgtaagggtcagaagggccagcaggtgggtgtcctaggcacaaacggtggctgctgctgtggactggaggaaggtaagaggccccgagtattccatgttcttactggctccccaactgaggattcctctcctgggctggtgctgtcctgcagcagggaggggttagacagggacggctgcacatcaggccggagtccatgtcatcctcttaggcactgtcactacagattgaggattctgttcataagccaagcctttgcacaaggaagggacccgggctctcaaggaagagcagctcctggtcagacctccatctccttctctctcattgcctgaggcctcaagcttggtctacctggcacaggggtctggatcctcctcccagggttggggtcttactgagctgggcacctgcaggtgggagaagatctggaggggccccatctgccttcaccagattgatgttgagggtccctgagtcctgcaccactatcaggtgctgagcaacttccagtgtcagtgacaaccaccccatggtggaagcagaaccacctcgtgagaaagcacctccaagcctcagtgcttgccatgtgtgggaatttgctggtttcagttgggggcatgttggtgggtggtcatgaattcagggccggattctatgctcacagtgcacatgctggatgtggtacagaccccaggcagggctcagtggggtggttttgggtgtgcacaggtatcttttctggaggagctggtggtgatttggctcccagaagttcctgagctctgcagactcaccaagcactcaatatttgagtgaacattgggcgagagagcagaaggtaagtgtcagggcatcggggttggtgcctctgggaagaggaggaacattctgggaacaaagctctcccccggcttacagggagcttcccatcgctcctgccttgaggatcagggaaactagggcctctgctcttccaggggctgcttgcaggcagtttgctctgggagggggtgacccaggagttgcctctcattttgcatttgagatttaaaaggagaagggacagtatatcttgccaggtcacaaaaattacaggcatcatattgactgaagggcactcctgtcatcactgcaatataccagaatggtcttttaaaaaaataagtgatttaggtttaccagcaactgtaatgcttgttttattcttctagttcaccgttaatgtcacttttgtagttttagcactggcaatgttgattttatgttgactctgatgattttaagctttcatttgttcacatagagatcatcttctttctgaatattaatgcattttttctctatttctactggttattcctgtacatagagtagagaatcacttttcccaaggaggtggaaagcttctgactaccaaaaaaaaaaaaaagtgtcaaaatgctttaaagtcagtaacttaaagatcaaatccaagagtgggcaacagattctgcccagggtctgaaaggtggagaggtgactggtgaggatgtttaaaagacctctcctctctactccctaaatgggggccatccagtgttcttgaggttcagagaaggcccagggctggggcagcagggcactgtcagctcccagctcccaggggccaggagtaagaccccaacactgtccagacactgattgcattcattttgggggagagtagattcttatttaaagaataatacaaaagtctacaaatatgaacataaacagaaattcctttgctacaattttccccttaataagacattccttcctaatgacatatgtgactgcattcatggctgagatgttttctaggatggtgagagcatcagagtggactatctggtgccttggggtcatgcattttcttcttccaatgtctacaggatcccccatgtcccactttgtagtgtaactcagtgtgtgtcattctggtttttgttgtatagatccttggaaagcccatgtcattcctgctgtgaggtacaggcagccaaatggcatcatctctaaacatgccttctcctggtacatcaaattatggaataaatgaaagccattttgacagatattgaagatataagtttctactcttcccacacatgcttctcccaagtgaaggattttactggtgaattgttattagagattagtgtggatcagtgactctgccaggggaaattttgccctctaggggacatttggcaaagtctggaaacattgttggttgtcagagctgggggagggagtcctgctggcattgagtgggtggatggtgctgaacaccctgcagttcacagagccccaccagtttgaccacccaaatgtcaatgctgaggagtggagagccctgctgtgccctcccgcagcttccctgaagcttcccctcacctgctcctcccatgtctccccaccacttccccacttcacccgcctccttacacctcagtcccctccacctgaactcaccccttagtccaaggccagccctgatctccgctctcctggtctccttgctccttagcaggaggcgcccactagatggcgcccttgcccttactggagctcaccgtctccctttccaccctgagacaaatgtggctgcttttactgccacaaccccagccctccacactctagatttgctcagggagcagctcctggacagacctcagggaccccagggaggagcctcactctggagattttgatggcatggtctttgaacttcactgttacccccagtcaggatccaggatgttgggagtgcatgattctgcccggtcccacttcagcaggaccccactgctgagttgtctgtggggacccgggcctctcatctccttcttgcattgcaggagagggatcttagcactgctttcacataaagtcagataatggaggagtgcaggtgagtttgggaaggtggacatgaagagaggttgtgtccctagaggtggcagcagtgagaggatgggcaggtgggaggaacacagcccatccagggttgccagccatattaggagcgacagcctttcctctaagcctccagcctttttcctgaaacattccagaactttccacttcagcacttcccactgaggctcctcaggtctgtccctgagctcccagctgagcctacctacccatctgaaatcctgagtcctgtgtcaccctcgttccccattattctgtgcagttctgtgggacgcccagctctcctgacacccccagtcttcagaatggccatcagcgctgtcgctgtggcaccagggtgactgccgcctggaggctgagtcctggcttcctgacagctgtggggcccgctctaggctcccttgtcctgatcattcatcacctccaggatgcacagcagctgggccagggggaggagcagggacaggtgtcagccaccctgtgtgtctgcaagtcaggctgggggtgtgggaggacgccaggaatgactgaactttctgatttagagggtgagagcttgcactgatggaatttgggatttaataggaaaagcatagcgttttcctattttgtaggcagggtggctggagtttggaatcatagattcccctgggatgtcactgtggacctcagtcccacccgttaggggcacagatttcagaatccacaccctggggcaaagcaggcatgggaggctccatcagcctggccagggctctctatttgtgcagctgctgcaaggagatgtgcactctgatgggaacagtgctccctcctccttggggggcagtatctagctccctgcagcccctctccctgcaggccctgccctctctgaacctcaccttccccaacccgccccccgcaatcccatctcagctgtaatcccaacactttctcatccattatgggtggactgcttgagcccaggggttcaagactatgctggctggacaatatagcgagttgttgtctctacaaaaagacaaaaattagctgtgcatggtggcatacacctgtagtcccagtcactcaggaggctgaggtgggaggattgcttgagctggggaggctgagttggcagtgagttgagattgtgccactgtatacttcagtgtaggtaacagagcgagaccctgtctcaaaaaataaaagtaaaaaaaaaaaaagaaatatggaatacattattgttaactctaatcaaccatgctatgcaatagtccaccagtaataccagtaatagccaataatgaattatctgaaaaagaatacaatttattcttagctatctactgctaaaatttttaagctatcttttatgatagctgaaacaaaagaagtaaatttaaccaaggaagtaaaagacctttataatgaaaactgtaaaacattgatgaaataaattgaaaaagacacacgcacaaatagaagatattccatgttcatgaattggaagaactgatattgctaaaatgtccttaccacccaaagtggtctacagattcaatgcaatttctgtcaaaacaccaatgatattcttcgaagaagtagaagatcctaaaattagaaaccacaaaaattcctaaaacctgcacaaaacaccctgagttgccaaagcaatcttaaacaaatagaacaaagctagtggcattacacttcctgacaatcaaagcatactgcaaagctatagtaaccaaatcagcatggtcctggcataaaaacaagcacatagatcaatgaaacagaataaaaatcccagaaataaacccatgcatctctagctaactgattttcagccaaggagccacatgcacacaatggggaaaggacagcctcttcaataagtggtgctggggaattggatattcatatgcagaagaatgaacctagaccctatccctcaccatgcacaaaaaattaactcaaaatgtattaaataaagacttaaatgtaagaactgaaactatgaaactactagaagaaaatatagggggaaaatccatgacattggtctaggcaaagagtttttggataaaatctcaacagcataagcaacaaaaccaaatataaacaaacgggatttcatcaaactaaaaagcttttatacagcaaagaaaaaaaaggccagcagagcaaagagacaacctacaaatgggaggagaatatatttgtaaatatatacatatatatttgtaaatatatacatctgataagaagataatatccaaaatatataagaaaattatgtttctgtatagttttatctgactgggatacagaggccacatccacagtcccatcctcaaaggccacttgttcccaaaatgtcaagcacatccctcaatgatccatcatcaacacctatgtctgtaggatgaagggtgaatcatgaagcactaaaaaggaagaaggaagccaatcccaaaacaaaatgatgcagggtctggaaagtccaaagcattttttttttttttttactgcatcttcctcctttcttctccacattcccaatcctcactattgattaacaaaacaaaaaaaactgggacccaccatcttccctactgtcaggagatctagcgagattgtttgagtcttagaccaaactttgccataagccaaatttctggctgactttacaatgatatgagctagcacagtctctttttctgccagtcaacttgtgctcggttttatttgcaaccaaatagaggtggtaaccaaatataggtgaccctaaaattagtcatcaggatgaaatcctaaaatgtgcaacaaactgggttgaattcaggattagtagcaacatctctgttgtgggcttgaaaagggggcacccttttatgcagtagcaaaattgctaaattgttgtttgctgagtctttggactctcatcccggattttctatgaccattcaaacagggctgcaatgaacatctatggttgtttagcttggcacacttctacatttctatatagtaatatctagaagtgcatttgctcaatcacaagatatgcacattttataattgactgctatcgaactaccttaaatagccttaatttgttctcaacattgtttaacagggtctgtttaatgtcctacgtccagcaaggacagtatcacttttcttaatatttttcaaattattggaccttaacaaatacttaatgtgcaattaattgattcctttgtattcccatgccttcttttatatgtttccttatagtacacaaaaccacattattgtttctttacttgtgtcattccaccctggaccattcctatctaaactataacattatgagagagagagagagagaaaacaatatgaaaatataaattgattaatcaaaaaaatttaaataggacaaatcaggaagacacaagagagattttaaaattattcagagaataccacaatagctgtaccaatatattttaaaacttagatgaaacggacaactatctcgataaatgtaaattaccaaaactgactcatgaaaaaatggatattatgaatagagcaataatcagtaaagcaattaaaaagacagttgataatttttatttactgacaacaataacaaaatttcaggtcctgatatttttatggtgaattttaacaaattttcaagctcctcctcaaccaattctcagaaggtttaaaactttaacaagaaaacactttctaacacattttcagaagctgttatagcatgataccaaaaccacacaagaaaattatagaccaatctcacttacaaatatacatgcaaaatcaaacaaaatcttagtgaaccaaattcagaattaataatagcaaacaagcaaaatatgttatcatacgtatggcttatatcaggaatgcaagtatgtttcaacatcagaaaatacttctccacattaacagactaaaggagaaaaacgcttgtttaattatctcaataggtttttagagaattttgaaaattttataaagttatgcgtattctgtaaaattgatgaaatccaaccttgatttatttttaaaaattgcctttcctatagaattataggtaaaggaaacacatgcatcctcacagagctacttcaaggctaagttacttcccataagtaacgtatcctgtaatgtgtgcttggcacatattcaatactaaacaaatatttgcaaatcctcaaaccacttctcgctcaaataacccacctttgtcttttgcctttatgttagggttgattttctcaattgtatcttggagatcctttggtgggtctttcagcaattaccctgaatttgcttttctgtttacaattttaattcctgggaactctttcttgttctctgactgcacccttttcatgagagttcagccatcaatcctccagaaccccaccccccccgcccccccaaaaagcaataaagatgtctaaaagcttccttctgggctttcgaatgatgtttaccccaggcatttgttctattcgttcatcacccattttccctacaacttgcctacacttgatatcagatttttatttattagtcacctatcttcttcattggcccattttcctattttgccactggttgttctcaaatgtgttatgattcctggttgtacagtcaagtggttgataatcttggatatacgataaagatttgctctgtagctgtgtgtaagcctatataaaagcttttgtatttttcttcttaaaaaagacaaaagatggttgggaagatccctccagttcaccagttcgaggctgcagtgagctatgatagcgccgctgctctagcctgtctgtctgtgaaaaacaaggggggcggggggcgggggggaagactggagatgtaaatctcccgcagggccctacccgtatccgcaacaggtctctaacaggaacagcctcaggcctgtgttggaacaaggtaggttacagaaatctggaagccagatctgtaacttcagggtaaggactggctctcagggctgatcccccgggctgggtgtcccagaggcacccgcccccgccccttccccaaggcaggccaggacaccttcactcctctccttaggctccccacccccttctcctccccactgtgcctcctggagtagcggtggcggtgccacaggggagcggggcggggcgggctctgagggcaagggggatgggccccgccggggtcactggcggccaccctggaaactcgacgcaggccggcccttctagtgaatcgtcccagccacagctggcctcccagccgcgcttggggcgcctcggggcgcgaatggtgcaggttggggagactcaccacgcaccgtcgggggtcggtccggttattcctcaccgctcggctccagtgggcgcgcgggcctctcctcctcagttcctgcgctgcagtccctccctcacccttcgcagcttgggaatccaactgtgtcattccgacggagcgccgtgaggacctccgagggtgttagcgccaagtgatctctgtccagcgctctgaatatccaagtaaaggagttcaatgaagggcgggtcaacggaggagaaaccgtgactctctcaagggagcccaaggcctccttgtctaattagtgacgcgccaatggatggaggctcttcccaccatctcttcccagcatccagtgacaccaccgccaagggacgggctcggcggaacctgcaggaaagaagcatcggctgagcctgactgcagcgctgtgaagagacaggggaggggatcagtagttggtcccgcgcccaccccctgtttccgcgaggggcggagttgactggccatgcaggcagagggcgaaatgtgaaattccactactcctaccgtttttccctgacccgatggggcggagtgtcgtcaggctaagttccctggcggtaaggtggggagattgaggcgcacacctgccgaacggtaacgcaggattagctaaggcgagctcaggacagaagcctcccgaggagcaggagggcaaaataataaataaataaataaataataaataactcactccttggtctttatttgcggcaggaattcagaaggtgaaagcggggccttaggatctttctgaccttttgggttttaagcaggaggtgtcagaaatgttaccacagggctagctggcttgtggccagcaagcgttcacaatgccctcgatttttcatccctctctgtgggttctttttttcattgtaaggcagaatttctacgattgctcacccactcagagaacctgagctggtttagaccaggtgagacaggctaggtttaccctggtgatgatgtgttgttgccatggcgatcctgcccagtaccagaggccctgcagattcagatgcttggtgcctgtgcttggctgaggggccaatgggtgaagctgccatctgcgggatgatgactgaagcctctaagtcagaatccgcccaggctgagccttagggcagctccatggagcctcggctggcctgggatagagagtccaccactgtgccagcccccagccactgcctaggtcctgtgctgagagccccttgtccagggaaatggcgtccagtggaaaagggaccacccccttgcccttcactcaaggcaggttggtgacaaccctgaagctaatccgttcctagaggagctgcttctgggtccgagttttctctgcagcagagcagctccctggatgggatctgttcaaagtccgcctttcacgcggaattttccgtccttgcaattttccacctccaccactaggggatcctctctgaccgcctcatgccggctctggcctctgagcaggggtttctcttctgcatgtgcgaccttgcgcatgcctagtggccttttgggacctagagctgctccacaccccgatggggttacagagtgcctcgcctccactccaccccaccagggttccttccctggctgggatgggatttcagaagcgccgaggaacagcccagacaggtgtgggagagtagccaaggcccctgtcccggggtggccaggacagcggtggcctcgcataggacctggctgggctgctgcaatcagtgtcctgccccttggagagcaacagtgaaaacaacaagactatcttcacccaccttaagaaagaacagaaccagtatccccaactctgctgtgtatcccaacccaattccattccccaccccactctcagtagccaatatgcaaaatattagaatactcttactgttattattttcaaccacactctgcatcctgaaaaaccatatatttcgttatgtgcttttaaacttcttgaaaatgaaatactgaggctgggcgcagtggctgacacctgtaatcccagcacttcgggaggcggaggcaggcggatcacgaggtcaggagatcgagaccatcctggctaacacagtgaaaccccatctctactaaaaatacaaaaaattagccgggcgtggtggcgggcgcctgtagtcccagctacttgggaggctgaggcaggagaacggcgtgaacccgggaggtggagcttgcactgagccgagatcgcgccactgcactccagcctgggcgacagcgccagactctgtctccaaaaaaaaaaagaaaaaagaaatactgaattttcaaatacttgctttttttttcggtcaaaattatgttctcaaatttcactcctgtagatgtgcgtggctggctgtagtttttgcatttttattattaggtattctcctgttgcattaatatgccacattttatttctctcatgtttttggtgaccacttggggtgttttttggttttgtatttttgctgtatacatgctgccatggtggacatacctctttatacatatttcctgttgtatgcagacacaattttaggatgtgacatcttcagcttttctattgtgtcgtgtgtcttttccttcgtgctttgtgttatttacatattctggacacagattctttgtcaactgtatgtgctgcacatctctttcccagtttgtgtcttcttcttcttttttttttcttaaaaaaaactttctttatagtgttttttttttctttctttctttgttttgttttgtttttttgagatggagtcttgctctgtcacctaggctgaagtgcactggccgatctcggctcactgcaacctccgtctcctgggttcaagtgattctcctgcctcagcttcccaagtagctgggattacaggtgcctgtcaccacacccagctaatttttgtatttttagtacagatggggtttcaccatgtttgtcaggctggtctcgaactcctgacctcaggtgatccaccctctttggcctcccaaagtgttgggattacaggcgtgagccacagcacctggcctgtgttctttcttaagtagatgttacttttaatataatagaatgtatcatattttgcttttatattagtactttttctatctaattcaaacacatccccaagggtctttgtgtgtagactgaccaatttctcaagaatcatgaatgaatactgcttctctttccccaatttatctgtaatgctacctttattataaagtttctatgcatgtgtagaaatagttcctgatttttcactctgtgccaccagcataccaatagcacgctgtcttaaatattaaatagcagagctttatgagacaacttgatgtgcagtaggcaattgcccccttgttactcttcttcagggttctttgttgtaccacatgaattttagaattggcttgtccagctaaaagacaactgcaaggattttatttggaagttcataattctatacataatttggggaaagtattttcataataccaagtcttcctattaatgaacacagactctctctctctctcccccacccccacctgtttagttatttatatctttatggtctgttagttattgtttattgtctttcaaccaggtttcatgtttttctacatagaggccttgcatgtgaaagtctttcttcctagcttgctattacaaattttttttaattgcactttttgggtacagtggcttgtactgtaatccccgatacctgggaggctgaggcagatggattgcttgagtccagaagttcaagaccagcctgggcaacataatgaggtccctgtctcaaaaagtttgttttaaaaattgcatttgctgttattcaacaaatgtcattgtgtctcatatatggatttttatatctgataaccttgttcaacaatcttttgattctaacaatatatcagattcttttgagttttccatatagacaataatgtcatctgtaaattataattgtttcttctttgttatttcttggaccttttattttatatttttgtcttgctgcaaggcaatatccctctatatattgtggggtcttttttctcataaagtggggatggtgaacacccttgtcttgctctctgattgtataaagcatgctttctgtagcattttgtagacgctcttttttagattgaggtaattcacttttatttctggtttactgagtttttagcataaattcaggctgaatttgagctaaagctttttctggagacatcatttgaaaaattcatatgatttactttctttaagtcaccaaagttatgatttacattgaactgagtttctactgtttaactgtattcttgggagaaaacccacttgtcactgaacaatatctgttttatttactgctgtcttgtgtctaaattttcttttaggattttttgtatatgctcagattagcctgttattctcctttctgtatttttttctggtttgggggtcaaagttataatagcctcacaataagagctaagaaaccagccctaatggaggccggggcaggaggtttggagttcaagaccagtctgggcaaaatagtgagacccccatctctatgaaaaatagaaattagccaggcatggcagtgagtacctgtagtcctaggtacttgggagggtgaggcaggaggattgcttgagcctaggaatttgaggctgcagcgaactatgattgtgccactgtactccagcctggatgacagagcgagaccctgtctcaaaagaaaaaaaaagaagaaataaaaaggaaaagataaaagagctaagcatctgtttccttttttccattttctgggagagtatgtgtaagactgtaattaactgtttcttgaataatgggagaactctgtaaaataatctggctttggtgttacctgtattggaaggatgaaaaataccaattcagtttcattattggttgatagggctactcatgctttttgttttgttttgttttgttttgtttttgagaggaagtctctctgtattgccctgttgtccaggctgagatgcaacgttgttcacaggcctgatcctggctcactacagcttctaacttccgatctcaatagatcctcccgcctcagccttcccagtagctaggactacaagcatgcagcatcacatccagcctcttttcctgcctgacccagttctggtttcctttagttttctaggtgttcatccattttatctaatgtttaatgcatttggcataagggtgctcagtgtcctttcattgtctgttgtctgtaactgttgccattttcattcctatttatgagtactggcgtcttctctcactttttcttaataatcctgctggaactttgctttttaaagaacatcttttgacttgttgattcttttttcatacatattaactattttcttattttttgcctttatatttatttcttttcctgtttgaaacattgctcttttcttactataaaaatgggtaagtagctcatgaattaccacctcttttaaaaatcttttctactgtaagcattttagcagtttacatttgcccacaagtaccacttcagctacaccctatgtgcttttacataaagtcttcatttttggtaagacatattctcaaattttaattatcacttgtttttaaatccatgatgttttatttgaaatgttgtttctaaagatacattttctggttatacttttattcttctaatttagcacagtggccacaaaacatggtctgtgcagtgcatacaatcgatgagtaatttctgagctgtagtatttggcataatatatggcaaaatttcctaagttttccatgtgtgctttaaaaaacttccagtaaaatacataaatctgttagatcaagcttctcacattgttcaaatagtctatatgtttactgattcatttgactgcttgatttatcaattacaggtaggaatgtattcaaatctcctattaaagtgtgacactcaagtggctttttaaagacagagatgccaaaccaatgaatacatgattttccccaaagcctgcacaaattctctaatgaaattttaccatgaaagtttgtttaattaaggcttactaaagcagtatgttgtcttttactttttaaacagagaatatatattttaatacatcgtttaagtttatgattaattatctattactgaggataagaatctttgcctgtgctcattcagcatttgcacttcatttatgatctgccttctcatagcttctgttaatttttatactagagacatttatttgtttgtataaatgttgaaggtttttttttgttgttgttgtttttgagtcagagcctcgctctgtcacccaggctggagtgcagtggcatgatctcggctcactgcagcctccatctcctgggttaaagtgattctcctgcctcagcctccagagtagctgggactacaggcatgtgccaccaagcaaggctaatattttgtatttttagtagagatggggtttcgtcctgttagccagggtggtctcgatctcctgacctcatgatctacctgcctcggcctcccaaagtgctaggattacaggtgtgagccaccgtgcccagctgggttttttatattataaggagatgtaatagatagatagatgtttcaaagatagtcaaatgtttttaaaatttaaaacacttttttacaggttgactttcaccatttaatttcatctatgtgttttgccttagagaaattttaaatgctatgtagatctcatgacttataattatgaagcattttgttttctgttttccacgaaacttagcttaactttgagcatataatagttgtaaaggtaggagagtaacactgaaaaaaggaattgcataaaaatggcacattttctgtagagttgtttatcgcctgaaaataggccccatttcatggaagtaagatgatcaggctcaggtccccagacgaaactcttggcatggtttttggagatagtccagggctcagtactggctctatcatttgctacttctcccaaagtaaccaatatctcatccaccctgagcccatttccatatctctaacatgaggataatagcatctaccttacacaccaagtagagggatcaaatgtaggaactaaatcaaagtaccagcactgaataacctacatcctcccacttcccaaaaggaagagagatgtatcccctgttgacaaacgagaccattttgcaggagagaaaggaaatgccagttcacttgcaatgtaaacatgctctctctttttagggatgtccagggacctgagagagaacccatgcttaccaaagagtttctagttccagacacacaggactcgaagggtgacaagtatggttttcagggtccctgaatccacccagtcctcacagaaactcctaaaagctgtcgattgacagcgttgagttcacagctctggtcctcacatgctgatactgcttgtgatatcgaacccgacaggaccccacatcacaattgatttaccaactacaatataatacctcctgaatctccaaattggctcacccaggaacaaaggcttggggtaaaactggattaggagatataagctctgaattttctgagggtgagacacacaaggattctaagtgacacgccacagagtaacgggtctgtgactggaggacccacagatttgtcttactggagacaccacatgcacacaaactccatccttagctgtggaaacaagggtcttttgctatcttagccgaattctgggagtaatttttggaggggaggagatctttgggattgcctctttcaggccctttacaaaaatacctacttcttaaatggtaaagcttacactaaactgaaaaaattacatccttggctttttatgaagtaggtgttggattgaatcactactggaagaagtatggcatcgcaaattctaagcagtggtcaaaggatggatctgttaaattagaaaaatctctaaatttataaaaagattttagattcctttattctaaacaattgacctatttgtactcatgggacaatcaaatttcaaaggagatatgtaacgatttcatggcttgcattaaaaatccttctgataaaattaaagataaaaaatctgaccccctgccaaaaaaatcttttgaagttcatactgcctgctttcaatattctgtgggattcacaatgaaaggtgccttatattgtggcctagcttcaagtttatgccttcgccaccatggcctgggttcaattcccagtcagggccccagcgcctttggtttaatgtttgcgtggcatttgacttttttacctatttagtattggtgagattacctttggtaaaaaaaagtttaaagagtggaaatcgcaattctttgtgttggctaaaatctgattataagagatctggaaggttttatttttctttttcaaagagctctatggtcagaagtcggcttcatgaaaagctaatatttaattatatgtacatacagtctttctggattttctcttttgcctcctgttttgaaaaatatttggatttgagtgaaactccgttttagaaattaattgcttggtacaatatacccatgtaactaccctgcacatgtaccccctgaatctataataagagttgaaattttgacaaaataaaattagattttgaattaaaacaaataggtgcttggttcctctgctcacttctttttaaaaggaattcctctcccatgtacttcttcttttcccttctttaccttccttttggcatctttggtatcacatgaagggatctagagggaattttaagtgactctgaaattccttgagaaatacacaaaaagatcccactcaccccttttgggggtctcctgttctccttgtggagtccagagtcagggacaggctcctccaggtctgcagctctgctctcttttatttcatcttggctgattgctttggttttgtgagtaccaggcattactttgtactgtgagagacacgtcctttgtgagtgcaacggctgctgggtcactggtgagggctgcagtttggagatggctgagagccgttgcaataaatggttgtgattgcagggggctccttgtttctttgcaagtttagatgagaaaggtgcagtttggacacagtttaaaggctgtgaaaacaccaccaatgaatatgatttcctttggggatggtctgattaaaagtgggctgattgttgctgtgctactagccttgaagacatgtttctacagcattgtgcagtgtggaaaaattgtgtggcttggtcttgtggcatgtcccttcttttagagacctcagattcaatgtgaaattcgggatttttgattttcaaagatctagatgccctgccttccagatgtgcctactcttcacatattttaaaattagatcctataaactgcaaatactttgttggcttctgtgagatcagaggtccagttagaaaaggaagacagtttgttaaaattaaaaactatttatctaatctaactagattggcctccaaatatgactttctgacattcagctggttactctgaaaagatttctaaatctcttgaggctcatctatatgtttccttgcaaagaaaaaaaaaaaaaaaaaaaagcaagcccaagcactagtaagaaaaagatttgcaatgtttcatgaaaggagtagatgagtgaagcatttatttgtagatactgggttggatacctgtgcaaagaagaagaggtcaataataaaaattgccaggggatttcttggaacttaacaagctgaattaaatatagaaatgtcaggaaatcaaggcaggaaatactcacttgtggttaggcagacagggcagggttctgagcttgagatggagcaaacagttgtggtgggtgaagttcacatgctttagagctcagctgtcctagtaaagaagcctaagagtctctaaagctcttatgagaagatggattttttttgcctagattaaaaggttaaagaattgctttaagttggataaaataaagctaaatgtttaagcaagttgtgaaaggtttatgaaaaaattaattaaaatatttttgtgtgtaaacatattgactaaagttgaaggggtataattcagcatttctgtaaattgagcattgaaataaaaacacaatgggtttctcttagagcactaacctgctctttaacaaaaattgtaaagggttatagaaagtctataaaaatgttaccttatggtcaaacattaaaattgggtaaatatgtctatcaggttttattaagaattaggtttaacattaatagtacactaatgtaaaggtgaaatttggcttatttggtacaaaaatcatacaggaagcattgtgaaatataaaatgatttttagctttctttgggctatatttctataaatatgttattgatgagggttccaaagttatgggagactcctataattctgctatatctcagtgtacattatcagtcataattataattgtcatgttaaattattgtgggccacagaggtaacagatttccttgtcaattgtgtctttgactatgactaccctaaaacgttcagtcacccatatacacatgttaccttgttttggccctctttagaaggtaattttataatcagctataaagccctaacaggtgctcttaaatgcaaattttgataactttggagattgtgacatcagaagagaggaaaaatgttcgggacacttggagagctaaaatgttcattgatatcaagcaggacaggaattaactgcatgaagtgaactaataggaggctgaagtgatctttttgactttttgcttaaaacgttgctgatcctttgttttgcttttcagagtcaaggcaaattttcttttgagctattgacagcttttaacgattaatcaaaatatactcctatgaacaccatttggagcattatttgtttctctctacccgatttccccagaatttggaaactatttgtgggtattcttaatttatggcaatatagttatttgcataagtgcaataagaatgtgttttctttggtaacaggacacaatttgaaaaactggttattttaccaaggttttgaccagaatgctgtgctttcctttaaggaatcaaacttgacttgtggagctaataaagcctttggaaaactgaccttatatcctgtgaacacagtccctgtacagggttactgatctgtgggaagaaaagaatgtcacattctgacaggtcaggaatcccaagttatcttgaaacttcaagaggacaggaattcacccaaccatatgtatttgatggtagaaatccatggcaggggctcagctttaaaaagtcttatctcagattccttctataaaacaaagtcccattaaaaccaattttaaaagcctatgtgaaaaataattattcttgctgcacctcgtacaaataaagtggcaaagcataataaagcaaattggtcctgtcgtaatttgtctttagtaaaaacgggaaactggggtcgggtgcagtggctcactcctgtaatcccagcactttgggaggctgaggtgggcagatcatctgaggtcaggagttcaagaccagcctggccaacatggtgaaaccccatctctacaaaaatacaaaaatgagccgggcatgatggcgggtgcctgtaatcccagctactcaaggggctgaggcagggaagcggaggttacagtgagtcaagatcgtgccacttcacgacagcctgggtgacagagcaagactccatctcaacaacaacaacaaaaaagggtaactggagagagggaagttatgtttcaaaaacttttggaaactatagtacacctgtttttaaattctagtctggcattcagtttttattattttctacagtttgggttaaattcgtatttctctggctacaagtctcctaaataatcttttcatttgtttcctttttctttccctttttccccatttttcttaattggaaatcactgaaacctaagctgtgctttcttaaagccctgtgaactgaagactagacaaccgaaacttctgaaggaagtagcagcaacctatttatatgtgttgctgttgcctactattatgttttagcaggtgctgcctctacacccccgaaacagagagtgctactgggaacaaatcgactttttccactccagtgctgcattcggtgccccataacgatgaccccctctcagcaggaagtagccagaaagattacaatgctccatctccctatgattcttgtgataaataaatatacaagcatgatagaaatcatgcgcaaattgacagtggggattgtggcaggccagatttcactaatggaggtccccatcacaactacttcagtactgactgagtggttaagttcagtatcaaaagctgaaagtgccagcgcctttctacaaaggctagaatgtaacaaaagcccaccaagggttttacctaggcctttcctgggccttacagcatgacaaaacaaagaaggaattcttaaccagacctgtttaggattaaacaaatttaattgggggtctgaagaaactcgccaggcctccacaaacaagttcattgggggtctaaaggaaccccccccaaacctctgtgattgagcaggagacaaggtcagggtaattgccccagcacctggactcatttagatttaagtaaatgtactgaggctccagagaaaggtctccaagacttagactagagttacagattaaaagaagttaatcacttatatctttagataaatgcacactgacacgtagacatacatcttagaaaatatataagctctggaaaaccttgtaatttacagttggtctggagatattttctgggccttctctctgtaaccggttccagaaataaaaaactctcttcctccccagtttatctgcatctcgttattgggccgtgagaaatagcagccagaccctgagtttggtctgggaacacactggctgggcttcctgcctggcggtagagcttcactgtcctccttcccagccaaaatgtggcccttgaaggcttcctccccaactgaccggttttgggttctaggtactcagggaacaccgtcttcaaggaggccattttcatactgttcctggtttgatttttctgaaattaggaaatgccccttgaggcatccaggattgtctttatttcccctgaagcttcccctcctgaagaaaaaagttctcaaacaccctcaggactcaaaccccaagttcaccctgtgaaacattcccatttcctaaacccaggcaggctcatggccctcagcctctcagaccccatggaaacctcctcccccacttcacgggttctctccatattgagagcctcccctcctcggcacacaacccagagactcaccccaacatgtgtagcaaatcaccctggaaacaatcatggctgaacgtggtagcccatgcctgtaatcccagcactttgggaggcccaggaggtggatcacctgaggtcgggagttcgagaccagcgaggccaacatggtgaaacctcgactctactaaaaatacaaagttcactgggcattgtggtgtgtacctgtaatctcaactactcaggaggctgaggcaggagaatcacttaaacctgggagacagagattgcagagagccaagatcgcaccattacactccagcctgggcaagaagagtgaaactacatctaaaaaaaaaaaaaaaaaaaggaaaaggaaaagaaaaaaaaaatcatgaggcaacattgcatttaacaatattttatttatcaaaagacacttgtctttctcaggtaagtgaaggtctagagatgaaacgagtcccgatgtaaattgccccatgggcattgctgagatcacaagatcatcactgcagcatgcagcacaatagtaaatttctcaggatggaagttcaacaatccaaaaggtagtattttttttcatgatgctcagtccatcatacgaaataaaaataaattccttttcatgatcatccattcagtagaaaaaatgatagtaaatttgttctcatgaagatttttaccgtaacatataggatttatcgttattattattattctttgttttttgtttttttgaagcggagtctcactctgttacccagtctggagtgcagtcgtgcgatctgggcacactattaacctccacctccagggttcaagcatttctcctgcctcagcttcccgagtagctgggattacaggcatgcgccaccacacccggctaattttcgtatttttactagagatggggtttcaccgcattggtcgagctggatttgagctccggacctcgggtcatccgcccatctcagcctcccaaagtgctgggattacaggcgtgagccaccgcgcccggcctcaatttatcattattcacgcatccacaaactgggttcttatattttgtacgtgattttttccattgaggagagatatctgtgcatattcatgctgctcatatttcatccacaaactcggttcatatttcatccacaaacataattttttccgttgagaagagatacttgtacatatttatgctgttcaaattcacatttcatcattcttttacaagaaatagataatgtattttaaggttttccagtggtattacagatattttactgggtgtatagatagaaattaaaccaaacttctttgttctggccgccagtcatgcatcctgttttcaacatagttcacatacaactggttgtgtaaaaatgaaattattttgtttagtacaatcatcaacagttggttgattagatttttaattatcaagttaatcattgtcattatgcttctcatcgcactcgtcattaattgctgtgggaggaaatttgttatgttccctatgagagggtgtatcacaaattcaaataagaattcaacgacaatggactgtataaaggaaataagcaagtccatggaaaacatatttttttccggaaaggattaaaatatttttaaaaaggaattaaaaaaaaattgggcacggtggcaaatgcctagagtcccagctgctcaggagatggagacagaaggattgcttgagcccaggaataagttggaggctgtagtgaacagtgattccaccactgtactccagccagggcaatagagggaaaccctctttctaaaaagacaaaaagaaacaaaacaaaacaaaaaaacaccacatcaaaaaacccaacaacaaaatgaaaaaccaaataacagcaatacaattggagctattcgatccaaagaagtaaatgaaacataaagcaaataaaagagaaaagctaatacctgtgtcctgcaggactcagtccaagttctgctctgactccctcctggtgagccaccccttaaaaagtcacttggggcggggttactttgacagacagtcttctgtcaaagagggaggcggtaaatagcacttttttttttttaatttaacgcctttccaacaaattagcggctatgttgtctaagagtgcaaatgtcagaggtgggtacaggcagcaagaccctccccacaggggcagcagaaggaggaatgactaagggaacaagactttagtgtgctcaactacacaggacaggaaacagatgctttttacaaaagctggtggacttgaaggcagaatattttcaagttcctgtaactgcgaactatgacctgtagcctgtgagagtgactttctgtggcaaaggagcttttgtgaatgtgaggaagttaattatcttaacagtgggaggttctcccggcttatctagctagaccctcgtgaaatcccaagtgtccttaggaaggggaagcagagagagatttgagtccagaagaggaagaaggtgatgtgaggcccagtaggggaacaaagggcgatggcatgtaaacacttagcccccagaagtgggagagggctggggttcatcacaccagaatccctaacaatcagccttattttaattacccttgaaatggaaggaggccttagagagccagaggcttggaggggcaccctctgctgcatacacagatcccaactgctgtgggctccaaataattgcaccagggaaatcacaaattatcaaaaataaaggatgtaaagcttttaaaaaatattaaaagcccaacaaataaaaaaagttctaaatctataaaattgacctcagtctgtatatttagatgagtcatgtgtatatagcgtttcacttcaaaatatatgataaatctctcattcattggcttaaaaataaacacttcaatcaagtctttatcagaaaaattgaaacgttaactcaattgccttttagttcatgtgactttacaaaacttaaaacaataaagtcagttttaaaaattattagtaaagtaaaagaaaaatatcttcacaatgtagacattttgtccacatgagacatgtgaaatattgccattactaaatatttgcaggtcaaaaactgtttccaaaacattttaaataatcatctggcctgtctgttttagagcattcaattctagctgaggtctggggacatgtgaaaggagccacggcccgactccgtgctgggaagagtcagacattttccacagctctgtcctttgctgtgggctctgcaactcctaccaattaaaattgcttacgtttttgttttatttttactaaagaggggttcctaaaagctaacattatactgagtatatgtaactaaaactactaagaaaacaatttcacaattatacaaatgtgccaagtaaatgaaaaaataaactgtattttaataaaggttataaaaagaaaaacatatagtggtgtgaggactgtctcaggtcttcactgagcaagggatcatgacattctatggcggacagctgaccttggctttctgctcctcttgattatgtctactaagtgacatacttactctttttccacctgtcttgcctctaagggtaacaggttttatgagatccctcctagtgctttgcaggtcagcctccctttgctgcattccaattttactgcctataccctccagctggcttttgatgacaaaagtcctggtcccagccattctcagattctgtcatccccgtgggcactatggagctcagcactatgggaggttccccaaaaatctcgttttctatgaggaatggccaccacctgcatctcagtgatgctagtgacccctttcctactcctgtgctcactggtcctcatgaagatcctggttggtctgtagccccctatttttcctattaaagagaaattacagtaagacccatttgtgtgcaaaatcaattttaggcttattacacttggcctgataatttgcataaaatgcagcaagaattcatcggccatataggctacttttgagttaattttcctgggtttttacctaaaaatatactattttggttagagtcttgtgaaaataaccaatgtgttcaattgttttattttaaaaggctcttactgaacactataaatatgtataagttgaatatacaaactatattgtcataaaatcacaacccaaaatgtggagaacgcagagggaaaggtaaatttgctcgcaaaaacatacttcacccaaataactggaaaaaaaaaaagactttcatgacccttctttaaccagagcagcagctttcaaacaaggtgtttgccttggaaatgccattcacaagccaaacggcccttgagagctgtctgtcaggcactgtagaatctagcagctcctcacagagttagaaatagtttcaggaaagagattccctgcttttagtaactgcactttatattcccagatagcgagattgtatgtaaaccatttttatcttattctggaactcttttgggtactttttttttttttttttaaatgatggagtctggctctgttgctcaggctggggtgtagtggtgcgatttcagggtatgagaaaatgcagctggacctggctctttccaggaagaccctcacagccaaggagtccaaagcctggggttttcatctaattccagtgtgactggggtaggagcagctttggtgctgggtgtgtgtgtgtgtgtgtgtgtgtgtgtgtgtgtctatgcctgtgtctgtttagggtgttaggctcgtggttgtctagatacaaatgtcccagggctcaggagccccagggttatgtcaggggcaccagatgaaggtgtcaacagaagttagggcacaagggacaaaggtgagagcaaggttagattcatttaggtgcaagaaatcatagagggaggagggagaggaagccctcctgctaccaccgaggaagaagcgcagcttaaggcagaaagcctgtccggagaggaagtgagtttgagggcagggctctctgggtaaagtacggtctgggacaccagcctgggggaagggtacagaatgcagagtggcctggcgtggggactaagaacagaggagagcagctttcactgggagggtcagtgttttcagtgtccagcactgagcaaggtgagatttgggcagcttgctgtgaaataaggtcaggctctggcattgtccccattgcgtgtgtgtgtgaggggcactttgggagagtgaactctccacctccatcctctcatacgtccttcaaccgagcttgccagttaccctgattccaaggagatctatttattgttgacaatactggatcctagcagaggctgggtaggagcctgggcacaagcaagtggaggagggggcctgggcctgaaagacctgggaggtttgagagaggacacagcccacagaatggagcagatggggtagagtcggcaagcattcagggctcctagtaagttggacaatggagaccctgaaagatccagtaaaacggggagaacaaacaggtccccaactcacatccttgcagtgcctggagcttcagactccagacaggtggggaaggaaaattgagggatgtgaacatgttggagaatgtcgtgccctgaagaatgaagaaaaggggggtgaggaatgagagcaggaacggcttccagtgcctggtgcccaggagaactcagaaaatgggtgtggtggagaggaatcgaggaaccggaagtggtggaagtgtgcagggcccctccgagatcactgtgactgccaggcgtcctccctggctggagagcttcactgtcctccttcccagccaaaatgtgtcccttgaaagcttcctccccaatggactggttctgggtcctatatatttgaaggggtggcctgcctctccacacctgtgggtatttctagttgggtgggaggagagacagagaaaagaaataagacacagagacaaagtataaagaaacaacagtgggtccaggggaccagcactcagcacaccaagggcctgcaccggcaccggcctctgagtttcctcagtttttattgattattattttcattatttcagcaaaaaggaatgtagtaggagagcagggtgataataaggagaaggtcaatgaaaaacatgtgagcaaaagaatctatatcataattaagttcaagggaaagtactatgcctggacgtgcactcaggccagatttatgtttctctccacccaaacatctcagtggagtaaagaataacaaggcagtattactgcaaacatgtctcacctcccgccacagggcagcttttctcctatctcagagttgaacaaatgtacaattgggttttacaccgagacattcagttctgaggggcaagcaggagacagtggccttcctccatctcgactgcaagaggctttcctcttttactaatccacctcagcacagaccctttatgggtgttgggctgggggacagtcaggtccttctcatcccatgaggccatatttcagactatcacatggggagaaaccttggacaataccccgctttcaagggcagaggtccctgcggctttccacagtgtattgtgcccctggtttattgagactagagaatggcaatgacctttaccaagtatactgcttgtaaatattttgttaacaaggcacatcctgcacagccctaggtcccttaaaccttgatttcatacaacacatgtttttgtgagctccaagttgggtcaaagtggctgggtcaaagtggctggggcaaagctacaaattaacaacatctcagcaaagccattgttcaaagtacaggtctttttcaaaatggagtctcttatgtctttcctttctacatggacacagtgacagtctgatctctctttcctttccctacatatattcatggaccacagtcttcaaggagtccatttcctcactgtttttggtttgatttctctgaaattaggaaatgccccattgaggcacccaggattgtctttacttcccccagagcttccactcctgaggcaggagcttctcaaacaccccccaagactcaacacctaatttcaccctctgaaaccttcccatttcttaaatccaggcagggtcatggtccttagcccctcagatgctgtggagaccttctttccctttcatacattctctcaagattaaaagccacccctcctcagcacacaccccagagactcaccccaacatgcattgcaaatcaccctggaaacagtcataagaccacactcatttaataatattttatttatcaaaagacactctttctcaggtaagtgaagttctggagaggaaaagaggagtcctgatgtaaattgccctgcaggccttgctgagatcacaaggagattgttactgcagcttgtagcacaatagtaaatttcttctctggatggaagttcaacaatccagatcgtagtatattccttttcattatgctcagtccagcaaatgtgatgataacaaattccttttcatgatcatccattcagcagagaaaatgtttgtaaatgtgttttcatgaagatgtttaccataacatacaggatttaccattatcaatgcatccacaaactctgctgttgttttttatacataattttttccatcgagaagtgatagttgtacatattcatgctgttcatatttcaaccacaaactctgctggtttttttatacgtaattttttccattgagaagtgatacttgtacatatttgtgctgttcatatttcatgtttcatcatccttttacaataaataggttatattgtattttaagtttttctaactgtagtgcagaaattgtactgggtgtatacatagatatcaaaccaaatttacttgttctggctgataatgcatcatttatttcatagattatgtatttctttgacacatttcacgtacaactaattgcataaaaatgaattttcttttagtatagacatcagcatgtgcttaattcggaatttaattgttgagttaaacatcgtcattgccttttccgttgttattaattgctctggtgggaattttgttatctcatacataagacagtgtgccacaatatctcttaaaatttcaatggcaataaactttatatttaaaaacagggaatctatggaaaacacatttttttctaaaggattaaaatatttttttaaaataattttctaaaaagttaggcacggtagcaaacgtctagagtcccagctactcaggaggctgagacaggaggattgcttaagcctacgagttgggggctgcagtgaactgtgattgcaccactacattccagccagggcaatagaagttaaccctttttctaaaaaaaaaaaaaaaagaaagaaagaaagaaaaaaagcaacaacaccaaaacctcaccaacaaaatggtaaagaaaaaaaaaacagcaatacaatgtaagctatttgatccaaagaagtcaatgaaatttaaaacaaatgaaagggaaaaagtaatacttgagtcctgcaggactcagtccaagttctgctgtgcctccctcacggtgagccacccctttagaagtcacttgggtcataagttaacccgataggaagtgtcctggccaatgaactagggaggtggtaaatggcaccattttaaatttaaattcacggccttttcaacggatcagtagccatgttgggtaagagtgcaaatgtcagaggtgaaaagaggcagcaggaccctcccctagtgcttgggcaacagaaggtggaatcactaaggggacaagactttagcatgctcaagtacacaggacagaaaacatgctttttacaaaagctggtaaatatgaagagggaacattttcaagttcctgtaaccaagaactaccgcctgtaaccggtgaaagtgactttctatggcaaaagcgtttttgaaaaggtgaggaagttaaatatcttaatgttgggaggttcttctggtttatctggctagaccctaatggaatcccaagtgtccttatggagcggggagcagagagagagatttgagtccagacgaggaagaaggtgatgtgagtctgggtgcgggacagggggagaatgatgctatgtggggatctgggctggggaatgacttagctgcatgagcggagtgacttagactcctgaactagaagaaatctagggctcatcacctcagcagccctaaccatcaaccttatttttattacaggtcttccatcgacggactccctaaaaagccagcggcgtggaggggcgccctctattggacaaatagatcttgactactttcggccctcaaatagcctgactaggcaaataacaaataataataatttttttttaaatcatggaaaatattttaaaaaacaattaaaaagttataaatctataaaatctgcttctgtctgtgtgtctgtatatttagatgtctcatgtgtacataatgtttcactaccaaaatatatgatgaaaccctcattaatcggcttagaaaactaaacacctaaatattttctcagaaaatacaaaaactttaactcaaatcccttttaattcacctgactttaaaaatctttaaaaaataaagcatgctttaaaattattagtaaagtaaaattagaacatcttcagaatttagacatttggtttaaattatacaggtcaaatactgcccttagtaaatattttcaggtcataaacaactcctgtaatcttttaaataattgaattacatgtctgttttagagctttaagttctagctaaagcctggggacaaatgaagggcaccatgccccctctctgtgctggaaagagacattttctacagctctgacccttgcagtaggctttgcaactgctacctatcaaaattgcctacatcctaagtttattattaaaaggagttgcttggagttaacattataatgaatatatgtaactaaaactatttctcatacaaagtatatgaaaaagtagaatgtatttttaataaaaagttataaaaagacatgaacatgtagtttttataaaaaacagtaattttgtctagttttgcagttctaaaaagttatgttaaattcaaaaataaaaaataacaagacaagactcaaggtttaaataagttgtaaaagatttgtaaaaattagttctataaaaattttacaaaaaaaagcattggttaaaatttaaggaattattttgtttttacagaaattaaacattcattaaaaacactctgatacaaggccttaatttgggttcatgtatcagaatagcagggttttcttagaatattaatctattctttaaaagaactatgaatgttatgcaaactttataaaaatcttaccttagagtcaaactgattaaaattccatagattttacgtaaaattttattaaaaattaacttcaacaaaaataaaatttgattttctcctttaaacaaaagttttgcgtaatattaaataataaagcatttttgtttaccttttaaactataaacacacacacacatacacatacaccaacactaaagtcagctgacctcatactgtctttattggatattcttgtttaaaaaactatcttctttggaaaataaagttttttattttaaaccatattttaaattatcattttgactaaatccataacatacagtgatctgtaataattctattttataatatcaagtgttttgaagaactccaggaacagccatgagagaacactgtggtttagtaacactttatttcctcagtttgaaaatagttgtctttcttggggaggccggtttcagcagatgaaaacaagagtcatgatgaaaattacccagcagtggttagtgtgaccataggaacattgtcatcaggtcagcagaaaacatatcagcaaatttttctcatactggcagtgtgtaggggtggatgtttacagttcctgaagccccagtggtcgtgtggtcttttagttttgccatttataggcaacttgtggtaactagctcaattagacacattccttatcacaaggacagagggctttctgtatcctagggttcttgccttggcattccagaagaatcaggtcacacgtggacgtggagaatgagtgcaaggttttattgagtggaagtagctctcagcagatgggggagccagaaaggagattggtttctccctggattggggccgttcagcagccctggctctcctctgactgccccaggcaaaatccacatcgttctataagtcggtgccctgctggtgtgctggtgcctgttgtcatgttcctcttcatgtccagccgcctgtgtgttcctccgctgatgtgctcctctcgacgtcaagcctcctgtgtgtctgactgctagggtcttggggtttttataagcacaggatgggtcttagcaggccaggatgatcttgggaaagacaacattcggtcaggaaaacaaaaatgcctgttgtcatctaggtccgtggggacaagcccaggtgtggagcttttagccagggaccacagcctcctgtatccaacacttcccttcaccttttctatatcattcaaagggatcatgcccttcccatcccagcacttcactttcatgtcatttgccccctctgaagaggtacatctaactgccattagaatatggatgatgaccagtcttagctgcttcctgctgaaagggggcattgttttgggggaaaacggcagtcagattcctcccaggggtctctataataaaagatcgaggtggctactttcaggaggtcctctaatgtactatctggtcccaagtcccatttctgcaacctcctcctgatgtcaggagctgcctgagtaataattttatcctttaggattatctgtccctcgattgaattaggagatagagaggtgtgatttaccaaggcctctcttagcctctccaggaaggcagtgggattttcatcaaatccctggttaattatggacaacttagtataattgagaggcttggtcttagacctacgtaagccctctattatgcacacctgaaagtgtctcctcttccagtcttccatctcattattgggatcccatttagggtccttcactggtgctacttctcttccagttggataatattcgctcccttccctgatgctataggtgatgcaaagctcatccccaaatctctctgctgctggcagagcagcctgcttctcagtgtctatcaggttctgactcaaaagtaacataacgtctctccaggagagttcaaatgttagggtgaaattctggaaagcttctatatatctatcagggtcatctgaacacttgcccagatctcccttaatttgctttaagtcttgtagggaaaagaggacttggaccttactgggcccaaattcactgggcatctgtaggaggggcaagagtgagactgggcttgtttgggatgaagatttctaggaggggccaggtgagaggctgaagctggatacggaggttggggtggacccagaggagcagggcttgagggagctggcacgtcagctgggggtgcgtctgggactcgtgtctttaattccctgggcttgaccctggcagccttccccgagacagcaaacaggagggctggaacaatcctacatgtcagcaaaggtctggattgctttgcaaggtatagaaagcctgcacatttggggcctcagaccatgtgtcctcacatccagagaaaagttctaattgcaggatggtattgaaatgaatggtcccttcctgaagccaagccagtccttcctgtaaaccataatttggccaaacctatgtgcggagggctatgagatgcttttcctctggattctgagggtcaaaacagtcccaatggttcaggatacactcaaggggagtacaagctgggggtggtgaggagaactggctgcccattctgaaagacagggaatagaggtgttcctcatttcccttccttcttttggcaaaaagctcagggtgtgatggggagggaaagcaagcatcttcacttcactttccacctcttacccctgcgccctggcaaccttggcaggtgccggccacaggtacaaatgcggtatgtacccatgaagcagggagaacctggagattaggaattaactgccctcacctatgtttccttttctccctgctgttgaaaaactttgagttccctgggcctttttatcccatgaggcatggcctccttctgtgggatggggttcagtcagcaggaattggtcctgtccatttacattgtgcctgttgcctggctttgaattcctcagacctgctttctctttctagggcctcagcctgaagcttggaattgagtttgggactgaaaaagcatttcagaggctgtttatatccatttagtgcctcaaataagccctgctgaatttgcaattatcagccagcaggggtcactcctctgttaacttccctattagaaacagagcggtggggattctcacttagaaaagaaaaaaagagaaaaacagttaaagaggcaaaaagtggggaatgctgggggaagaaccccttgcttagtgcaagtgggcccctctaatccttataactttcccatccttcccccagttcagaccaggttgaattccttggccatggaaggaaaggttccattgatgcagtgggtgagaagcactctgtagggtcctggctaccatcggttttctcacacccccctcatcccaggcagtggagggagacacttctgcgacattgctccccctgccccttcatggctattgggtgtggcctttgcctgctgcaggcatgcctaggtgctggagctgggagggaaaagggtaaggagaggtgccctggaagccgctcatgcctggggctgtcaaggtggaggcatacatggcacctctaggaaaaattggtctgatttgcacctttggcggctgagccaaatgctcattttacttagtaacattgcctcagcctgtagcaaaactcttaacattataaaggaagagataagatccatttcaaataatgtgtgagagagaaaagagatgaaaggaaaacagagtcttttacctgcaggaaagggagagaagtggcagagttttggaagaaaggcaggcccaacagtttcccattcactcacactcaccttccgagatcccagacgagccaccagttgaaatgggaaaagtttccttgtccccctcacaggaggtggagtgggggtgtggcttgcttctttagtactccgctgctcaaacctctagggaagcatacagactggcaagttgtggggctacaaccccatggcagcatctaggggtagatgtttacagctgctgaagccccagtggacatgtggtaccatgtgctcttttagttttgccatctataggtggctttgtggtaaccagctcaattagacccattccttaacccaaagacagagggctttctgtatcccgcggttgttacctaggtgtaccagaaaaatcaaatcacacgtggtcttggagaatgagtgcaaggttttattgagtggaagtagctctcagcagatgggggagccaaaagggagaatagttttcccctgaagtcgggttattcagcggcccaggctctcctctggctgccccagccaaactctatgtcaatccattggtcggtggcctgccagagtgctggtgcctgttggtggattcctctcagcgtcgagagtttttccctctcaggaaagggagagaagtggcagccacccatgtgttcttgcactgatgtgctcctctcgacgtccaacctcctgtgtgtctgcctgctagggtcccagagtttttttaggcacaggatagggcatggtgggccagggtgatcttgggaaatgcaacatttggtcaggaaaacaaaaatgcctgtcctcatctaggtccaggggcacaagcccaggtttggagccctagccagggaccccggcctcctctacccatcactttccttcaccttttctgtatcattcaaagggaccatgcccttcccttcccagcacttctcttctgtatcaataggtgatgtttttaaaatttcccaactctagtgcaggcatggtactagacatatacatagaaataaaaccacacttattcttctggctggcaagacatagtatttttgccaaattatgtgttgttttgaagcattttatgtacccctggtcatataaaaataaagctattttgttcagtacaaacagcagcattttctggattagaaagttaatcatcttaaaagatcatcacggatttttccattgcactcatcactaattgctttggcaaaaaatttcttatctcacgcatgacaaaatcagccgcagtatctcctagtaatttaatggtgatgatctttataaaggaaataagcacatcaagggaaaacataattttttttaaaaaaagagtaataaaactttttaaaagtcttttttaaaagactgcttttctaaaatagtaaaataaaactccaccaataaaaccaccaacaaaacagaaaagaaaaaataatgatatgatcggagctatttgatgaaagatggtaaattaaatttaaaatgattagaagagaaaaagcaatacctgtctcccgtaggtctcagtccaggttctgctatgcctttctcctggtgagccacctatttaagagtcgcttaaagcatatgttaatccaacaacagcagattaaaaaccaatgcaatctgaactatttgatctaaaaacataaataaaatttaaaacaaataaaagagaaaaagcagtacctgtgtcctgtaggtctcagtccaagatctgctctgactcccttgtggtgagttagccctttagaagtcacttggggtggggcatatgttaattccactaacattggttctggccaatgagtcaggaaggtggtaaatggcaccttttcttcttgctgatttctttcagttcctttggagtctggacattagtcctttgtcagatgcctagtttgtgactactgtttcctatactgtgggttgtgtgtttaccctgctgatatttcttctgccttgcagaagattttcggtttcattaggtcctattgatcttattctatttttatatttttgcgtttgcttttggggcattagtcatgactacttggcctaagccaatgtctagaaaagctttttggatgctatcttgtagcatttttagactttcaggtcttagatggaagtttttatatgctttgttaaagatcaggtgactgaaagtaccgggctttgtttctcggttctctattctgttccattgctctatgtgcctatttttatacttcctgcaccatttattgaataaagtgtcctttccccaattagtgtttttgcatactttgttgaagattagttgtctgtaagcatttggctttatttctgggttctctattctgttccattgctctatgtgcctatttttatacttcctgcaccatttattgaataaagtatcctttccccaattaatgtttttgtgtactttgttgaagattagttgtctgtaagcatttggctttatttctgggttctctattctgttctattgctctatgtgcatattttataccagtatcatgctattttggtgattgtagccttgtagtataatttaaagcctgccttcagatttgttctttttgcaaagtattgctttggatatgcggtcacgtttttggttttgtataaattttaggattcttttttctagttctgggaaggagaatgatgatattttgatgagaattctactgctctgtagatggctttggagagtatggtcactttcacaatattgattctacctattcataagcttataatgtgttcccatttgtttgtgtcaactgtgatttctttcagcactattttgtagttttccttgtaggaaacttacattaacctacttggttaagtatatttctaagtattttacttattaaaaattctcagggaaatgcaaagtaaaactgaggtgggaaattaaagaaaaataaaattaaaaagaaagggaaataagctttcttgtattaagctaacttgtcccagaggcagcaacaggcacagcccagacccaggaaaagtcttgataatattatttattgtattctggagactcttccagcactccttcaatgtagggagaagaaaaacaaattttcctttgttttatggtatgagtttatagattcttgttctctttaactagtaacttcaagtattctgttttatctaagaagtatggcaaaggtcatgagaagcctgagcaggcctgaactacagctctctaggcaccatagtgaagataaaccaatgcaagcctctttagagcaaaacctagataatagacatctgggttgcatagcaacagttatgtgcaatcctgagttatgaacctgttacaatttgattaactgtctttttcctgcctctgtatccctgctttcacaccactgtaagcttgcttcaagctggcccacccccttttgtgaagtgtgtataaaagtcaagtgctgtctttgttccaggccctgtctttggacgtgagtctgctgggcctgagagcactcaataaaagattctcctgttttaacccaaagcctctctctcatcctcctaaatcccacaacaaaaccacaatgagatgctatcttaatcttgctagaagcccataatttaaaagtcagaaaacaatagatgttggcatagatgtggtcaaaagggagcactttgacactgctagtgggaatttaaactagtccgaccactatggtaaacagtatggggattccttaaagaactaaaagtagaccattcattccagcaatcccattactggctatctacccaaaggaaaagaagttattccataaaaaagacacaagaatatggatgtttatagcagccgattcgcaattgcagtgatatgggaccaacttaagtgcccatcaacgaacgagtggataaagcaaatgtggtacaccatggaataatacttgataataaaaaggaacaaaataatgtcctttgcaacaagttggatggaactggaagccattattctaagtgaagtaactgaggaatggcaaatcaaatattgaatgttttcacttttaaatgagagttaagctatgagaatgcaaaggcataagaatgatataatggacttggggactcagggggaaaggttgggagggggatgaggaataaatgatgacatattgggtatattatacactgctcaggagacagatgcctcaaaatctcagaaattaccactaaggaacttttatccacataaccaaaaaccacatatattccacacactattgaaagaaacataaacattattttaaaaaataaagccacttttaaaattagcaaaataaaataaatatgtcttcagagtttagatattggatccaaattagacagatcaaatactgcctttactaaatattttcatgtcattaacaacttctaaaacctttcaaacagttttttgacatgtcttggaaccatccatttctagctaaggcctgggcacctgtgaaatagggccatgcccccccttatactgggaagagtaagatatttcaagactaagatgttttctacagctccatctttttctttaagctctacatcaaggacataattaaaattggttgtctcctaagtggtttactaaaaatgcatacttaagagttaccattataattaatatttgtatctaaagctacttaaaaattttcacacacaaatctgactgaacaagtaaaatatattttaagtcaaagtttataaaaggacatgagaacatagcttttatgaaaaaattagttttgtcaagtttagaggttttcaaatattttaaattcaggaaataaaataacaaaaagacaaaagaaaatggttgaacaacttagaaaaggtttgttaaaattcatcttataaaacaatctacatgtaaaaagtgggctaaaatttgaaagagattatttaggttttccataaattaatccagaaggggtaggaagtcttaagaatgaggaaggacaggaggaaggggaggtcatcctgacactgcagaggcagaagtgcagctgaaggtatgaaggctaagaggggaggggagtttgagtgctgctgcctggctgtcagagcagaggagggtcctgggcaccagacttgaggaagggatgaaaatgctgggcagacctgtagtgggcccttgagatggcagatagtggtttccagagagagggccattgttttccagtgcccagcactgagcagagagagttttgggcagtgtaaaaaaaaaaagagaacttacctctttctcgttttagaaaaagaacagtctaagaatatcagcagggaaactctcagtgcttcaaggggttaaacgcccttttggctttcttgtgttggtttcatcatagaggaggagaaacttcttggaagtgttcctaaaaacacaacacgtctgcttctcctttcaaaaaaggaagtgctaaaacacgaacactctagatccaaatattaatacggatgtctaaatgcttccgttttccaaggggcagaaagctaaaggttgtaacctattcatttcagtcaaagttggtgaaagggaagcaaaggaactgggtggggcttggaaggatgacgaagctcaagctcattggccagcaacctctctcctgggggcgggaggggtgagcatacgtcattgctttggcttctataaaatgaggaggactcaccgagtgtgaagagtccttctggtgattgcagctgagagcacactcacgacgttctgcaaggattctctgattatgattctgaagggaaaagcgatggaatggacagcagagattgtaattttctttatcttgaattacggaagaaagtatctaggacagaaatccacgacaagtccttggaaccagcagatctcttcgttcacggagacgttgacgtattctctattgaagaagattcttaccttcttactggacaaggttttgtcagttctgcgtgactggattgtccgggagactctgaggaaactgatgtcacatgtttttccaaagaagatgtttctggaaccaacaactgtgattgtggtttgaggacttctgagagttccagtacaggaaataagcagaacatcagctggaggctaaacggatccagacttcactcttcacttcccttcctattcagtctattgtgcctgctgactgagaagcttggctggtatgtgagcaaataaacggaactattcagaaggagatgttgacatattctgtattgaagaagatccttatcttctcacctgacaaggttttgtcagttctgtgtgactggattgtccggaagactctgaggaaactgatgtcacatgtttttccaaagaagatgtttctggaaccaacaactgtgattgtggtttgaggacgcctgggagttccggtatgcgaaataagcagaacatcagctggcggctgaagggatgcagcctccactcttcacttcccttgccattccatctattgtgtctgcctgactgagaagcttggctggtatgtgaggaaataaacggaattataaacaaggagattgtttctcatctacttcattctgttgtggcttttctattttggggttcagggtgtgtgacaaggaccaaggagatgaaaggtttcatgatggagaaagcccaggcaatcagattgaagagctatccacagggaatcttggctgctgaggggctgcaccctgcaacggactgaccatatgacagaaaagggttttaaaggctcaacttctggactgagaacccagagtaatttgggaacctcctctgtgaggagatatgaaagctgggaatcatgacatccctaggaatggaaggcacatttcctgatggaaggggtgctttggaaaacaggagcagagtagacacagcagccttgtggatacgggtgggcagcatgcatgggtgatgtgaacgtggagtgtttgtgatcgaaactcaaaatgtctgacaaagtgaaaacctagaaaccacaatgaggaggaagagtttgtgagggcaatcactctccccatgtgtgaaaatcgggggctcttaaaatctcatctggagaggtgcagtctaccaaactctgggactttagcctccccttttaaaaaaccgtgcatcaataccaacgtccgaaaccacagaaataacacctggcttgcatggagacaaggacaaaaagccgtcatgatgagttgttctgctcacttgctgcctctgttcagtgcacaggatattgtccacccactagcaggctactgcaagagaagtgtgcaatatgttccctatgtgccatatatgtgccatatggcccatatgacaactgagtcagaaaatatctgatgccctcagagttacactccacctggagcttgcccccagccatccaggacctaggctccctaccctgtccaattttctggtgttttgggggcttcattctctaaggtgtgcccactctttactcaaaccaaaacacccacatattcctgcccatgaacaaccaatcaaccacttctcagttccacatcctgctgttgggtctctagtggtgacactgtaactcccaggtcatagtggtgacactataacacctagctaaattgatgccttgtctctaggaggccatgggctcctgcaggtctcatctgactctctgtagccttccctgacaatgctcacaatacccaagccagagccacattgacagcaagctgctctcatcttacctttgccagacctggccactggaaaaggctgaccctcatcctgcaatgcctatacctccaacctttgtctcaagctggtgtcctggagggacttctaagcagaaaacagattcagactcccatcctctcctgaatggcctcatatccaattctcagaccctcagccttcattgtaaggacacttcatccatgcccttgagtattctgtctgcactgtgtattctgcaatagattctcctccctctgcgaccctcaactccttccgcagactttttgttttcttgatcatctaccatagtcttccactgggacactgccaagcccattctggagagtgagttgtgcaagtacactgccccccatctacctttcgggaggtgtatacacccttctttctcccaggtctggaggctttctattttcatcctgaggcatctccacctgctcttggattcttcaaattgacaaccaccagttaacaagaactatgtgtcaccaaatagccaaacaatggcaattacaaaaataaaattaatagctgtaacccccattagcaaggatacacaaatcaaatcagggatagtgggtgaggaagtctgcctaacattcaaggaaggattctgaagtgatacaaaatcattgcctttgctatctttagaatggacactttcagccaggcacagttgctcagcctgtaatcccagcactctgagagccccagttgggtggatcacttgaggccagcagcttgagaccaccctgggcaatgtgcagaaaccccaactctactaaaaatacaaaaatagccagttattgtggcacatgcctgtaatcccaactccttgggaggctgaggcacaagaatcacttgaatctgggagccagagtttgtaatgagcgaagatcatgccactgcactctagcctaggcattagagtgataatctgtctgtggaaaataaaaacattcctcttcaaagttttcttctttaaatcataaatgttggaattaatatatcctctttgaaactcactttcttcaagcttctttatttgatggtagtaaatctttgttaagctttatgaggcaagagtaatggaagaagcatattatatatatttatactctaacctcagtgcttgttctagcaagctcaggcatgcgtgaatgtgcccaggcatgttccagcccataccttatatcctttccttattgggaaatgctgttactcctataagcattcttgtaagcaacttcctctttttctttgtctccactatctttacctattgaggacagttttaggttcttagccagttggatgtagcatagactgtgaggtccaaccccagccaatggagatagcacacagcagtagcgacctcatgcttaacagataaatattcctgtctccctttgtttggggtgctctcagctgatgagcaacaccctttctaaagaaattaaagttgtcttgctgagaaaacttttggtctaaatgctgattcttccttgcagcactgaagaagaagcaattatttccaacactttctcatacacaaaaaaagaagaaggtggaagaaaactttcttgtgcaccctatccctcactcagaaagacaacagaaggctcctagtggcaagccctagaggattcatttcttttgggaaccctcttggctgggatactaggactcaggtcaaactcagcattttcagtgtgtgggaagtgtgcttgggtttcactgttacttccaataatgtgatttggtccttggggttcaccaaattttggtatggagtggtgaaccctgttaagtttaagtgtctataaaattaacaaagcaaaataaccattctgccccatggttcagagaccaaatattgtgtaggaaatgctttagcgagagaaacagagaagaataaaaaatgtcctcaagcgctgcattatttcttgttatcgtccagatcttagaggaaaggctttcattttccctcattcagtatgatattagctgtgcatctgtcatttatggcttttattatgttggggtatgttccctgtgtatgtagttttttcagggtttttgttatgaagtgatgttgaactttatcaaacgtttttcagtttcagttgaaacgatcatatgctttttgtccttcattctcttgatatgatgcatcatgttgatgatttccatatggtgcactgtccttgcatcctgggcatgaattccacttgatcatgacaaatgaatttttaatgcattcttgaattccgtttgctggtattttgttgaggatttttgcatcaatattcatcagagatattggcctgcagtttctttttttttcttttttctttgttttgttgtttgtttgtttgtttgttttgatgtgtctatgtctggttttggtatctgggtagtagtgttccatccccttttattttttagaataatttgaataagactggtgttggttctttaaatatttggtagaattccgaagtgaagtcattgggccccgggcttttctttagtggaaggctgtttattatggcttcaatctcgttacttattattggtctattcatgttttgaatttgttccttatttaatcttggtaggctgtgtgtatctaggaatttgtccatttcttttagattttcaaatttattggcacataattgcccattgtagcctctaatcgtcatttgagttcctgcagtaccaattataatgtctccttcttcatttttgattgtatttatttggatcctgcccctttttttcttacttaggctgcctaataatttcttaattttgttgaactttttcttttgtttgtctcgctctgccaccaggctggagtgtagtggtgtgatcttggctcactggaacctccgtctcccaggttcaagcaattctcctgcctcaccctcccaaatagctgggactacaggcaagtgccaccactcccagctaatttttgtatttttagtagacacgggttttcaccatgttggccaggatggtctcgatctcttgacttcataatccacctgcctcagcctcccaaagtgctgggattacaggcatgagccactgcgcccagcctaattttgtttaaattttcaagaaatcaacttcttctttcattgatttctgtattttttatttccattttatttatttaaactctaagctttattctatcttcttctcattttagctttggtatgcttattgcctctctagctctttaatgtgcattgttagattgtttatttgaagttcttcctctctacaccataagacgtaagcatgtcctcattatgtcataagatgtaaccacttacagctataaacttccttcttagttctgcttttgctgtatctcataggctttgttatgttgtgtttccattatcaattgtgtcagaaatttttcaatatttttcttaatttcttcattgagcaactgatcatttgggagcatatttttaaacttccatgtacttacatagtttccaaaatacctcttgtgatcaatttctagttttattccactatggttcaagaagatgcttgatattatttcaattttttttcacattttaagatgtgttttgtgacctaacatatggtctactttttttttttattaaactttaagttgtggggtacatgtgtagaccgtgcagttttgttacataggtatacacgtgccatggtggtttgctgctcccattaacctgtcatctacattaggtacttctcataatgctatccctcccctaacctccaccctctgacaggacctggtgtgtgatgttcccctccctgtgtccatgtgatctatttttgagaatgatccatgtggattagaatgctgtggaaaagactttggattcctaatatccagggagggagacgatgatattactttcaatatcacacgggtgtacacactctctgtgacattgttcctaatatccagtggaagagaggatgatataacacccagggagggagaggatgatattactcttaatattgcagggtgtgtacccatgcctatgatattgttcctaatatcaggagggggagaggatgatattactcagaatatggcagggggtgtacacacactctgtgacatggttcttaatatacaggggagaatgggacaatattactctcaatatcgcagggggcgtacaaccctgtgatttgttcctaatatacaaaaggggacagtatgatattgttcctaaaatcgcagaaggtgtacaacgccctgtgatattgttcctaatatccagggcgggagaggatgatattacccccaatatcacagggggtgtgcactttccctgttacattgttcctatgatccgagtggggggaaatgacattagtcccaatatcgcaggatgtgtacactactcccccatgatattgttcctaatatcaagggggagagaggaggatattactcccaatatcgcaagggaggtacatcctccatgcaatattgttcgtaatattcaggaggagagaggaagatattactctcaatatcgcagaaagtggacacccaccctgtgatgttcttcataatatccagggaagcagacgattatatgactttcaatatcgctgggagtgtacatcccttttgggatattgtttctaatatccaggaagggagaggattatattacttccagtattgcagccagtgtacacatttcttgtgatattgttcctaatatccagaaagggaaaggatgatattactcccaatattgcaggtggtgtacacccccctctgatattgttccttacatcaaggaaaagaaagaagaatattactcccaatatcgaagagagtgtacacccctcctgtgatattgtatttaatatccatggggaaagaggatgttgttactcccaatatcgcagggggtttacacccacactgtgatattgttcctaaaatccagtgaaggagaaaataatattgctcccaatattgcagggtgtatacaggccctcccccgttatattgctcctaatatccagcggtggagaggatattactttcaatttttgcagggagtgtgtaccccctctctgatatttttctaatatcaaggatgggaaaggatgccattactcccaatatcgcaggaggtgtacatgccctgtgatattgttcctaatatccagggaggtagaggatgatattactttcaatattgcaggggctgtacaccctctatgatgttgttattaatatttaggttgggagaaaatgatatttttcctaatatcctgggaaggaaaggatgatattactgtaaatattccagggagtgtacaccttcctaatattctaatattgttcctaatatccaggggtgggagaggattatattactcccaatatcgcagtgggtgtacacccctcctgtgatgttgtttctaatatccaagcgaggagaaaatgatatcactctcaataccgcagggggtgtacaccttccccatcatatcgttcctaatattcagagggaaagaagatgatgttactttcaatatcgcaggggttgtacacaacccctgtgatatttctcctaatatccaggaagaaagaggatgatattgctcccattatagcagacggtatacgcctccctgtaacattgtttctaatatcaagactgggagaggatgatatcacttccagtatcgcaaggggtgtacacctcccccgtgatattgttactaatatccagggggaagaggataatattactttcaatattgcaggggctgtacacccccgtgatattgttgttaatatttaggttgggagaaaatgatattagtccaaatatcgcagagagtgtacacacttccgataatattgttcttaatatccatgggggagacgatgatattacacccaatatcgcagggggtgtagtctccccttgtgatattgtccctaatattcagggaagtaaacgatgatgttagtgtgaatattccagggagtgtacaccccctttgtgatattgtcctaatatccgcaggagagaagataatattactcccaatatcgcagggggtgaacacaccccctgtgatattgtttctaatatccaagcgaggagaaaataatattactcccaatgtctcaggggatatacaccttccctatgatattgtttctaatattcaggtggaaaacgggtgatattactcctaatatccaggaagaaaggggattatgttactccccttatagcagggggtatacacctcccctgtaatattgttcctaatatcaaggctgggatatacgtggggggaaggatgatattactcccaatatcacaggggttataaaaccttctgtgatattgctcctaataaccatggcggaagaagatgatattactcctaatattgcaggaggtgtacactcccccattatgttgttcctagtatgcagaaaaggagaggatgacattattgccaatatcgcagggtgtgtacaccacccatgatattgttcctaatatttagagggacagaggatgatattactcccaatatcgcagggggtgtacacgcatcccctgtgatattgttcttgaaatcgaggggaaagagaattatatttctctaaatattgcagagggtgtacaccgccccctgtgatattgttcctaatagccgggggcggggggagataattaaattactttcaatatctcagagagtgtacatcccccttgtgacattgttcctaatatccagagcaaaagagaatgatattcctcccagtatcgcaggaagtgtacatttaacctgtaatattgtttctaatatccagggggaagagaatagtaatactcccaatatcgtaggggttgtacaccttttctgtgatattgttgcaaatatttagaagagagagagaatattactcgcaatatcacagggaatgtatacttcccctgtgatattgttctaatatctagaaaaagagaggataatattactcctaatattgcagggggtgtacacccccacttgtgatattgttcctaatataaaggaaggtcgaaaaacaaacggggagcccagggggaaggaaggcaggcgaggaagaggcagcgccggggcgccggagggagcagccgggccgcggaagcgcgagcacgagaccggtcgcggtcgcagtcgcatttttgccgttgtcgcggccgccgccgccgaggcttacccggggatgtctgagcccgcgcctcgcggcccccaagctccacgctgcgcccgctgtcccggcctctaagggccgccacgtccctgcggcgcgcgcaggcagaaagcggcttcgtgccggcggagggggcccgggcgggccgggaaaggctgccccaggccccgcgcctaccccatcaccgcggccggcgccgggccgggaggatgagcggtgtggggctctgaagcatggagggggttttgtacaagtggaccaactatctcacaggttggcagcctcgttggtttgttttagataatggaatcttatcctattatgattcacaagatgatgtttgcaaagggagcaaaggaagcataaagatggcagtttgtgaaattaaaggtgacagctttggaggggaccacccttgattggatacataaattctgttcattcagcagacaacacaagaatggaattaatcattcctggagagcagcatttctacatgaaggcagtgaacgcagctgaaagacagaggtggctggtcgctctggggagctccaaagcatgtttgactgatacaaggactaaaaacgaaaaagaaagaagtgaaaccagtgaatcgctgaaaaccaaaatgtctgaacttcgcctctactgtgacctcttaatgcagcaagttcatacgatacaggaatttgttcaccacgatgagaatcattcatctcctagtgcagagaacatcaatgaagcctcttctctgcttagtgccacgtgtaacacgttcatcacaacgcttgaggaatgtgtgaagatagccaatgccaggtttaaacctgagatgtttcaacggcaccatccggatcccttagtttctcctgtgtcaccttctcctgttcaaatgaggaagcgttctgtcagccaccctggttcttgcaccagggaggagtagccactgtataaaagaaccagtatctgcacttcaccgactctcccagcgacgccgaagaacctactcagatacagattcttgtagtgatattcctcttgaagacccagatagacctgttcactgttcaaaaaatacacttaatggagatttggcatcagcaaccattcctgaagaaagcagacttatggccaaaaaacaatctgaatcagaagatactcttccatccttctcttcctgaagaaactgtagtgtccaactttctctaagtattgctatgcaaaagctgctgtaattgaactattgttatagggagtagttttttcccttaggactctgcactttatagaatattgtaaaacagacaaacaagaaaacaaaccacatacttttgaagcgtgttttatctttatatagtttgtttgcaagagtattttcctaataacttcacagtatgaatgtgcatcttttttttctttttttaacaaatgatggtgtaacattttgacatccataaggacaaatgtagatatttttctaaaaaaccgtgaggggactgacagcttggtcagggtgtattgtagcttataaacatgaaatcttacaaggtttcagtttgacagaagtgtgatatatgtaacttgtgccatggaccaaatggtcactttaccacagctaaaaatgagttatgatagcagcttgatggtgattgcattgtattcctttaatcaaaaaggaaacgcaatattctaagtatctttagcccaaataccatgacatattgagcatctttaaataaccagactgtattgtccttcatatgtgaagttgacactactgatttgtcaataccaaattttgggttaaagtgtttaatttttatttatttattttcttgttgcctcaaaagatgattgcattctaacttttgtgacctaccaaatttaagatgtgtatacattgttctttacgttgttctagaaaagagattttaatgctgtagtgacttagctcacttacatcagagaaataaacaactttcaatggaaaaaaatatatataaaggaaggaagaggatgatattacttctcatatagaaggggttgtacaccccccttgtgatattgttcctaatattcagggagggagaggattatattactcccaatatagcagggagtgtacacccccccccccgtgataatgttcctaatattcagggaagcagaggatgatattactttcaatatcacagggggtgtgctgtccccctgttatattgttcttaatattcaggggggagaggatattattatgcccgatatcacaggagaagtacaccccacaagtgatattgttcctaatatccaggggtaaagaggatgatatcgcaggtggtgtacacccctccccgtgatattgtttctaatataaagaaggagagagcatgatattactcccaatatcgctggaggtctacaccccccttgtgatactgttcctaatatccaggaagggaaacaatgatattgctgtgaatattccagggggtgtacacccctttgtaatattgttcctcatatccagggggtagagaggatgatattactcccaatatcgcagggggtgcacggccccactgtgatattgtttttcatatccaggaggggagaggatgacattactctcaatatggcagggggcgaacaccccctgtgatattgtgctagttaggttgggagaaaatgatattactcccaatatcgcagggggtgtacaccgctcctgtgatattgttcctaatatccatgacgggagaggatattactcccaatatcgcagggggtgtacctctcccctgtgggattgttcacagtatccaaaagggaagaggatgatgttactcccaatatcacagggagtgtacaccaccattgtgatattgttcctaatagccagggaagaaaacgatgatattattgtgaatattacagggggtgtacacaccccctgtgatatggtttttaatatacaggttggaaaaggatgatattactcccaatatcacaaaaggtgtacacacccccccatgatattgttcttaatacttcggtggggagaaaatgatattagtctccatatcacaggggtgtgaactcctccggtgatattgtttttaatatcaagaggggaggagatgatattgctttcaatatcgctgggggtgtacatccctcctgtgatattgttccttatatccaggcgaggggaaaataatattactcccaatagtacacaccccatgtggtattgttcctaatactcagggggaaagaagataatattactttcaatatcacagggtttgtacacctttcctgtggtatagttttcaatatccagggggaaggtacatgatattactcccattgcagcaaggggtgtacacacctcctgtgatattgttcctaatatccagaagtggtgaggatgatattactcccagggggtgtacaccccacctatgatattgtttctaatatccaggggaaaagagtgtgatattatgcccaatatcgcagagggtgtacacttatcctgggatattgtttctagtatttggggagggaggagaggatgctattattctcaatatcgcagaaattgtacacccccgctgtgatattcttcataataatcagggaaaaagaggatgatattactaccaatattgcagggggttacacttcccctttggtagtgttcctaatatccaggaagaaagaggatgatattaatcccattttccaggaagtgtacacccaccgtgtcatgttgttcctaatatccagcagggaagaggatgatattactcccaatatcggagagggtgtacacttcccctgttatattgtttctaatacccagggggaagaaggatgacattactgccaatatcacagggtgtgtaccccaccctgctattgttcctaatattcaaaaggaaagatgaaaatattactcccaatatctcagggtgtgtacacctctcctgtgatatcgttcctaatatccacaggaagagagaatattactctcaatattgcaggggggtgtacacccccctgtgatattgttccaaatattcgggcggggagaggatgatattagtcccaatatcgcagggggtgtgcaccaacctgtgatattgttcctaatatccatgcgggggaggacgatatcactctcaatgtcgcaggaagtgtacacctctcttgttatatttttcttaatatccaggagggaaaagatgatattactgccaatatcgcagggtgtgtccaccccccttttatattgttcctaatatccaatggaaaagaggatgacattgctctccatatcccagaaggtgtacaacgcccctgtaatattgttcctaatattttgggggaagagaggatgatataacttataatatcacaggaggtgtacaccacccctatgtattgttcctaatatcctttaagggagaggatgatattactcccaatatctcaggtggtgcctattccccctgtgatattgtttttaatatccaggggaagagagtatgatattacgcccaatatcgcagggggcatacaccctctctgagatattgttcataatatatagagggagagaggatgatattacttccaatatcagaggtggggtacaccccccggttatattattcttgatatccaggaggggagaggttgatattactggatatatagcagggagtgttcacatcttctgtgatactgttcctaatatccagaaaagtagaggatgatattactcccaatatcgcagaacgtgtacacctccctgtgatattgatcctaacattcaaaggggagaggatgatattactcaaaacatcacagggcatgtacactcccctgtgatattgttcctagtatccagaagggagcaagataatattactttcaatatcgcagggggtgtacacccctctttggtatgtttcctaatatccagaaggaaagagggtgctattactttccatattgcaaggggtgtacacccccctgtggtatggttcataatatccagggagggaaagggtgctattattccccatatcgcgaggcatgtacaccctgctgcggtacggttcctaatatccagggggaaagaggatgctattacttcccatatcgcggggtgtgtacacccccgtgtggtatgttttgtaatctccgggaacgaagagggtgttattacccctcatatcgctggaaatgtacactcccctgtggtacggttcacaatatccaggggattgagggtgctattactccccatatcgcggggggagtgcacctccctgtggtatggttcgaaatatccagggtaagagagggtgctattattccccattttgcaggaggcgtacacccctctatggtatgttttgtaatatcccaggtaaggggtgctattgagagaagagagcaaaagaccccccccatattgttctgtattattttatactcagtacctgttttaagaagaaacaaggaagcgaaaccaaaggcaggcagcccggcgccaggcaccagatccaaaaccagacccgaaaccaggcctgggccttcctgaccttagcctgaaagttaaaattcaacccatgacctagcaactgatgttatccatagattccagacattgtatggaaggacattgtgaaatttcttgttctgttctgtttcactctgagtactggtgcatgcagcccttgtcacatacccactagattgctcaatcaatcatggccctttcatgtaaaaaccttagtgttgtgagcccttaaaaaggacagaaattgtgcactcaacaagcttggattttgatactctagtctgctgatgcttccagctgattaaaagccacttccttcactacctcggtgtctgtgggattttgtccgcggctcctcctgctacactgtgactccccttatagagaggggtgtacacccccctttggttcctaatatccagcgggggagtaggtgctattactccccatattgcggggagtgtacacccccttgtagtacggatcgtaaaatcaaggagggagagaaggtgtaattatccccatatcacagggagtgtacacccctttgtggtatagtttgtaatatccacgacgggagagaatgctattactccccatatcgtggagggtgtacaccgccctgtagtatggttcgtaatatccggaaggggagaggttgctattactccccatatggtgggaagtgtacacccccatgtgatatggttcataatatccaggggggtagaggatgatattacccacaatatcatagaaggtgcacacccttttgtgatattgtccataaaatccagaaggggagaggatgatattacttccaatatcacagggggtgtgtagccccatatgatattgtttgtaatatcaaggtagggagaggatgctattccttacaatagctcaaggggtgtaaccttcttgtgatattgtttgtaatatccagaaggggagaagataatttttttattttaaaagtaaactttaatgtcaaaaatgcaaacttgagaagggcagaaagatcaaacagaaggctgccacttcacaattggagggttgcacagtggccgggcagaggcgctcctcactccccagacggtgaggcagccgggcagaggtgctcctcacttccgagatgttgcaggagccgggcagaggtgctcctcacttcccagaacagggggctgccgggcagaggtgctcctcactgcccagacggtttgcaggcctggcagaggcactcctcacttcccaaacggagcagcggcaagccagaggcgctccacacttcccagatggtggggcagccgggcagaggcgatcctcacttctcagagggtagggcggcccagcagaggcgctcctcacttcccacatggtggggcggcaggctagaggcgatcctcacttcccagacggtggtgtggccatgcagaggtgctcctcacttcccagatggtgtggccgccgagctgaggcactcctcacttccctgacagtggggcggctgggcagaggcgctcctcacttcccagacacttggactccgggcagagactctcctcatttcccagatggtggggctgccgggcagaggcgctcctcacttcccagacggttcagaggccgggcagaggcgctctggggagaggataatgttactcccaatatcgcagggggtgcacactccctgtgatattgttccgaatatccagagggggaaaggatgatatagctcccaaaatcgtggggagtgtacacccccctgtgatcttgtttgtaataccaagaagaaaagagaatgctattatttccaatatagcagggggagtacaaccccctgtgatattgttcgtaatatctagggggagagaaaattatattagtcttaatatctcaggggacgttcatccccctgtaatattgttggtaatattcagaatggagaagatgatattgttcttaaaatacaggaaaaaatatgataatattacttccaatatcgaagggggtgtacactctcctgtgatattgttcccaatatccagaatgaaagaggatgctattactcccaatatcccagggagtgtacacccctttgccatattgttcataatatccaggggaagacaggataacattactcccaatatcaccgggggtgtccacccactagtgatatttattgttcatcatatccagaaaaggagaggatgatattactcccaatattgcaggtggtgtacggtccctgtgatattctttgaaatatctagaaaaggagaggatgatatcactccgagtatcacagggggtgtacacccccctgtgatattgttcgtaatatccaggggagaaaaggatgatataattgccaatatttcaggggatgtgcacctccctgtgatattgtttgtaatatccaggggtggagaggatgatattactcaaaataacgtaaacatcctgtgtgtacatcccctgtgatattgtttataatatccaggggggtagaagatgacattacccccaatatcacagagtgtacacacccctgggatactgttcataatatccaggcgggaaagaatgaactacttccaatatcgcaggatatgtacacccccctgtgatatatttcctaatatttatgtgggtaaggatattacccccaatatcacagaaggtgtacatcctctttgtgatattattcctaacatccaggaaaggagagaatgatattactcccagtatcgcagggggtgtacaccacccctgtgatattgttgctaatatccagggggagaggataatattactcccaaaatcacaggggacgtacactcctcctgagatattgttcctaatattcatggggaaaagaatgctactactccaaatacagcagagggtgtacaccatccccgtgatattgttttttatatccaaagggtgaaaggctgatattactcccaatatcgcagggggtgtacaggccccccatgatatcattcttaatatccagggaggcaaagaatgatgttactcccaatattgcaggctgtatacaccccccgtgatattgttcctaatatccagagtaagagaggatgacattgctcccaatattgcaggggttgcacgcacgccctgtgataatattactcccaatatcaacagtgggtgtacactcctcctgtgatattgtttgttatatctaagaaagaagaggatgatattactgtcaatatcacagaaggtgtacagccccttgtgatgttgtttctaatatccagcggtgagaggatggtattactcgcaatattgtagggggtgtccaacggccctgtgatattgtttctcatattcaaaaaggaaaagaataatataactccaaatatcgcagggtgtgtacacttccctgtgatattgatcctaatatccaggaagagagaggatgatattaatcccaatatcacagggggtgtacatcgcttctgtgatattcttcctaatatccagggggggaggggatgctattactcttaaaatcgcagggaacttacactcccactatgatatttttcctaatatccaggaagggagaaaatgatattactcctaatatcacatatcacaatgggtgtacatctccccgtgatattgtttctaatatcaaggatgggagaaaattatattactctcaatatcgcagggggtgtgcacacctcctgtgatattgttcctagtatccagcggaggagatgatattactttaaatattgtagaaggtgtacaacccccctttgatattgttcctaatatccagggggaaaggagatgatattactcctaatatcgcaggggctgtacaaccctatgtgatattgtttcttctaatatccaggggtggagaagataatattactcctaaaatcgaaggggacatacactccccctgtgatatttttcctaatatccagaaggaaagaggatgatattactcctaatattacaagaaatgtatacctgtcctgtgatattgttcctaatatccagaggggtaaatgattatattactcccaatatcgcaggggtgtacaccttccctgagatattgtttctaatatgcagtggaggagaggatggtattactcccaacatcacaggagatgtaaactccccttgtgatattcttcctaatgttcaggacgaaggagggtaatattactcactgtattgcagcagggggtgtagagccccctgtgatattgtttttaatattcaaggttggagaaaataatattccttccaatatcgcatggggtgtacacccttctttttatatagtttctaatatctggggggagaggatgatattactcccaatatcgcagggggattacacccccactgtgatattgtttttaatatccagggtgggagaggataatattactccaaatatcccagggctatacaccctccgtgtgatattgtttctaatatccagaggaagagaagatgatattactcccaatgtcacagggtgtgtacaggccttctttgatattgttcttaatatccatgagggagaggatgatattactcccaatatcgcaaagactgtacaccctttctgtgatattgcttccaatatccagggagggagaggatattacactcaggatcacagggggtgtacaccccaacctgtgatattgtttctaatatctagggaaaatgagggtgatattactatcaatatcacaggaggtgtacactcccttatgatattgttcctaatatccaggagaatgacaggataatattactcccaatatcgcgggtggtgtctccccccactccgtgatattgttcctaatacccagagggggagagaatcatattactcccaatatcgcaggggatgtacacctacatccggcggagtagaagataatattactcacaatatcgcaagaagtgttcaccttccctgttatattgttgctaatatccagggagtgagaagatgatattactttcaatactgagcgtgtacactacccctgtgatattgtttctcatatccagtagaggagaaaatcatgttactcccaatattgcaggggtgaacacctcctttgtgatatttttcctaatatcaggaaagggagagtatgatattacccttaatattgacaggggtgtacacccccctttgatattgttccaatatccaggggggcagaggataatattattcccaatatcgcagagggtgtacaccccccgtgatattgttcctaatatccagagaaataaaaaatagtattatttccaatatcacagggcgtacattttccctgtaattttgttcctaatatctggggggtggggtggcaggataatattactctcaatattggagagggtgtacacccccctgtgatattgttcctaatattcagggtgggagagaatgatgttactcccaatatctcaggagtcgtatacacccccttgtgatattttttctaatatccaggaggcagaggatgatattgctcccaatatcgcagggggtatacacccgagctgtgatattgtttctaatatgcaatatgggggaaggatgattttactttcaatatcgcagggaatgtacactttccttgtgattttgttcctaatatccaggggtggagaagatgctattactatattactcctcatatcgcaggcggtgtacaactccctgtgatatggttcagaatatccagagtgaaaaaggagggtgacattactcccaatatcgggggggtgtacacccctttgtgatgtggttggtaatatccaggggggcagatgagggtgatatcactccccatatcgtggaaggcgtccacttttttgtgatgtggttctttatatcccgaggggagaaggtgatattactccccatatcgcgaagggcatacacccccctgtgatatagctcataatattccggagagtggaggaagatactatgccctatatcgcgggtggcctacaaccccctatggtttggcttataatatccaggggggagagggtaatattgctccccatattgtggagacgtacagccccctgtgatatggtttgtaatatctttggggggcgagggtgatattactccccatatcgcggggagcatacacccccgtgatctggttcatagtatctcaaaggaagaagttgatgtgtacaacttaagggaaaaagttgaagtgaagtgtacacacgccctgtgacgtggttcataatatccaggcgggggagaggagagtgatatttactccccatatcgcgggtgttgtaaactcccctgtgatatagttcataatatccaggggagagaggagggtgatattgctcctcatatcgcgaagggtgtacaaccccctgtgatatggttcataatatccagaagggtagaggacgatgatattactccacatatcttgggaggtgtgatatggttcgtaatatccagcgatgagagaatgatattactccccatatcgcaaaaggtgtgatagggtttgtaatatcctgagggggagagggtgatattaatccctatattgcagaaggactacaccctcccatgacatggtttgtaatatcccagggggtagagtgtgatattactttccatatcacagggggtgtgatatgattcgtaatattcgaagggggagagggtgacactactctccatatcacggggtgtgtgatatggttcttaatatcccaggggttagaggttgatattaccccctttttggggggtgtgtacaccccctgtgatatggttcgtaatatcccgggggagacagggtgacattattccccatatcgaggggatcgtacaccccctgtggtgtggttcataatatccctagggggagatggtgatattactccccatatcagggggcgtgcactcttctgtggtataattagtaatatccagggggcagaggtcgatattcgtttccatatcatgaagggagtacacttccctgtgatatggttcctaatatccaggggggagagggtgatattattccccatattgcggggggacatacaacccctgtgatatggttcataataaccagaaaagaagagggtgatattaatccccgtattgcagagggcatacaccccccctgtgatatggtttgtaatatctaggggaggaaaaggtgatattactttccatattgctgggtgcagacacccctttatgatatggttcataatatccaagttggagagggtgatattacttcccatatcatgggaggtatacccttccctgtgatatggttcgtaatatccagaaggggagagattgatattactccccatattgtggggggcgtacaccttcctgtgatacggtttgtaatatctaggggatatagtgggtgatattactcaccatatcacgggggttgtaacatggtttgtaatatccaggggaggagagggtaatgttactccccatatctcggggcatgtacaccctcctgtgacatggttcgtaatatccaggtcgggagagggtgatattactcctcatattgccgggggtgtgttatggttcataatatcctggggaaggaggctgctatcactctccacatcttgggggatgtacactctcctgtgatatggttcataatatccagggtgggtgagggtaatattactccccatatcgcgggaagtgtacatacccctgtaatattgtttgtaatagaagagagggtgatattactccccacatcgcgggtggtgcccacccccctgtgatatggtttggaatatccagggggatgaggagggtgatattactccccatatctcggtgggagtacatccctctttgatcaagttcataatatccaaaaggaaacaggagagtgatattactccccatatcgccgggggtgtacacgggagggggagtacacccccggcgatatggtctgtaatatccagggaaggagaggagggtgatattactcaccatatcgcaggtggtctacatttacctgtgaaacagtttgtaatatccagggggggaaatgagaatgattttttttttttgagtctcactgtgtcacccaggttggagtgcagtggcacgatcttggctcactgcaacccccgcctcctggactcaagcaattctcctctcccagcctcctgaatagctgggactacaggcgcaccccacaacgtctggctaatttttgtatttttattagagacggggtttcaccatattggccaggctgatctcgaactcctgaccctgtgatccatccgcctcggcctccaaaagtgctgagattacagatgtgagccaccacgcatggcccaaggagaacgatattactccccatatcccagggggtgtatatccccctgtgatatggttcagaatatccggaaggaaagacagggatattacttcccatatcgcaaggggtgtgacatggttcgtaatatcccatgggggagagggtaatattactcttcgtattgtgaagggcatacactcccctgtgatacagttcataatattccggggagtagaggaagatattatgctccatatcgcgggtggcataagccccctgtggtttggttcataatatccagggaggagagggtaatattactccccatattgtggggacgtacaccctcctgtgatatggtttgtaatatcccagaggggagagagtgatattactccccatattgcagggacatacacccccctgtgatatggttcaaaatgtcttttttttttgaaggactggttctttatttcaaaaagacacttgtcaatattcattatcaaaacagttgcactattgatttctctttctcccaatcggccccaagtagaccacatcaaaggagagtacatattaagccaataagctgtaggatgtacacctaacagacctcctagaaaccttaccagaaaatggggacagggtagggaaagaaactttaaaagatcaacaaactgccagcccacggactgcaggggctgtcacagccagatggggtggccagggtgccacaaacccaaagaagcaaagtttcaaaataatataaaatttaaaaagttttgtacataagctattcaagatttctccagcactgactgatacaaagcacaatgagatggcacttgtagagacagcagcttcaaactcagaaaagggtaatgagatgagtttcacatggctaaatcagtggcaaaaacacaatcttctttctttctttctttctttcaaggaggcaagaaaagcaattaagtgctcacctcaacataaggggaacatgatccattctgtaagcagttgggagggggtagagatggaacaaaattttggtctcagaggtcttgccatcttaatttggtcacttctaatgaaaaaaataaaaaatagaaataacattatccaaaggtatcttaaagctgaaaacttgaacagcacattttttgttgttgttgtttggctaactcctcctggaaccacctttctggcttagctagtactttgtacagagcaatgaggcttcccatagtggagtctccctgggctctgtttggctctcagcaaggcaggcctataccttttcctctcctccatggagagaggaatatgcattaaggtgaaaaatcaccttccaaaagtgagaaagggattcgatcgctgcttcagggctgtggtattatatggaatgttttacaaaaggttgctacaaaacaacaaaagaggtaattacaaaatgtgtacatcacaacatactttttaaagacattatgcattgtgctcacattcccttaaatgttgtttccaaaggtgctcagcctctagcccagctggaatctccgggaagaggcggacagtttggtgaaaaagacacagggaaggagcgggcggcggaaggagggggcggcgaaaggagaaagcagccttccagttaaagatcagccctcaattaaaggtcagcttcgggcaggctggcctcaggcggagtctggttcagagggaggagcagcagcagggtgagactgaggcgttctacatctcattcaggtcaagcagagtctggtccagcatcctttgtgtacagaggtgctcccctttggtgcatttcagtttatcttccaagtcatcaattgtcttttccagcttggctaccgatctctcagcaaactcagcatgggtctccgcctcctttattttatcagtaagaatcttgatctcttcctcatatttgtcttctttttgagagtacttttcttcagcagcactcagacacttcaggttctggtccatcagtctaatctgctcatccatctctcggcaaagggattctgccagctcagctcgttcctctgtgcgttccaagtctccttcaatgatcaccaacttacgagccacctcttcatacttcctatctgcctcttctgcaatgtgcttagcttctctgagttggatttcctggagttccatcttttcttcatcttttaaggcccggttttcaataaccttcttacctctctcactctcatcagcagctttttccgcttcttccagcttttgcagggcagtagccaggtgctcctgagcacggtccagctcctcttcaaccagctggatcccacgttcaaggaggccacctcagcctcagcctgttcccgggcccacctttctccctcaacttctcgctggaggcgctcagctcgctcctctgcatcatctgcctgctgctgcagaacctggatcttgcgcttcaccgcctcgatggtggtgatcccagccatggtgcccacccagctactgctagagctccggttcctgcctcctccgatcggcgttgcagcctcctctcacccttacttccgcctcggttcaaaatatcttaagggaaggagttgatattactccccacatcacgggaagtttacatcccctggtgatatggtttgtaatatcccagggtggatagggtgatattactctccatatcgcgaaggagtactcccccctgtgatatggttcataatatccttggggggagagtgtgatattactccccatatcgcgagggccatatactcctttgtgacatggttcgaaatatcccggtgggggagggggtagagggtaatattactccccatacagcgaagagcatacgcccttctgtggcaaggttagtaatacttcagggaaaagagtgcaatattacttttcatattgcagggaacatacactcccctgtgacatggttcgtaatatcccgggggctgagagggtgatatttctccccatatcaccgggggcctacacctgggtgtgatatggctcataatatacagggagggagagggtgatattactccacataccgagtgaggggttacacaccctcgtgacatgttcgaaataccccaaggaggagacaatgatattactttccctgtcgcgggggctacaccctcccagtgatatggttcacaatatcccggggtggagagggtgatattactccctatatcaccggggggtgtacacttccctgggaaatggtttacagtatccccggggggagagggtactattactccccatatcacgttacatatcagggtacacccccacgtgatatggtttgtaacatcccaggaggaagaaaatgatattactccccatatcgcggtggcatacacccctccccgttaaatggttcataatatcttggggtggagagggtgatattactccccatatcacgtggggcatacaccccactatgatatggttcataatatcccggaggggagagggagatattactctccatgtcgcggggggcatatacacccctgtgatatggtttgtgatatcccgggggcggagagggagatattactctccatatcgtggggtcgtacacttttctgtgatatgattcgtaatatccagacggggagagggtgatattacttcccatattgcgggggcgtacacccctctgtgatatggttcataatatcccgaagaaaagagggtgatattactcctcatatcgcggggaacacacaccaccctgtgatatggtttgtaatattcagcgggggagagagtaatattactccctgtatctcggatggcgtacactcccctgtgatatggttcataatatccagaagaaaagagggtgatattactccccatattccagggaatgtacaccaccctttgaatatggttcgtaatatccaggaggggagagggtaatattgctcccaatatcgaaggaggtgttatacggttagtaatatccagagaaggagagggtgacattactccccacatcgtggtgggtgtgcacccacctgtgatatggttcataatattcaggttaagagaggtgatattgctttccatatcgccaagggtgtacactcccgtgaaatacagttcgtaatatccaaaaggggagagggtgatattactcccatatcgtggggggtgtacacccctctgtgatatggttcataatatccagggtggaataaggtggtattactccctgtatctcggggcatgtacatcgcctgtgatatgattcataatatccagaagaagagagggtgatattaatctccatattgctgggggtgtacaaccccctgttgtatggtttgttacactgagttggggagagggttacattactctcaatatcgagtggggcatacacacttatgtgatatggttcataatatcccagggaggagagggtgatattactccccatatcgcgggaggcatacaccccaatgtgatatggtttgtaatatctacatttttttttttgagacgaagtctcgctcttgtcccccaggctggagtatgatggccggatctcggctcactgcaacctcagcctcccgggttcaagcgattctcctgccttggtcccccaagaagttgggattacaggcgcacaccaccacgcccggctactttttgtatttttagtagagaaggggtttcaccatgttggccaggctggtctagaactcctgacctcagatgatccacctgcctcggcctcccaaagtgctgggattacaggcgtgagccactgcacctggcctggtttgtaatatctatgaagggggaaggtgatattactttccatatcacgggaggcgtacaccacgatgtgatatggtttgtaatatccagggggtatactgggtgatattactccccatatcgcggggagtgtatacccttttgtgatatggttcctaatattaagctgaggagaaggtaatattactccccatatcgcaggggtttttatatggttcataatattcaggaagagagagggtgacattactctccatatcacggggtgtgtactcccccatgtgatatggtttgtaatatccagggaaggagaggttaatattactccccatatcgcagggggtgtacacctctctgtggtttgtaatatccaaagggaagaggatgatattatcttcaatatcttggggggatacagtccccagtgatattgttcataatatccagagggggaggggatgatattactcccaatattgcaggtggtgtacaaccccctgtgatattctttataatatagagggggatgatgatattactcccaatatagtaaacaacctgtgtgtacaccccctgtgatattgtttataatatccaagggtggaaaggatgatattactcctcatatcgcagggggtgtatacccctctgtgacattgttcctaatattcaggggaggagaagatgatactactcctcatatcacaggggatgtacacccccctgtgatacttttggtaatatccaggggaggagaaaattatattattccccatgtcacagagggtgtacaccccgctgtgatagtgttcataatatccaggtgaaaagaggatgatattactccgaatatctcaggaagtgtacacccttctgtgatattgttcataatatccaaaggtggagaggaggatactactccccatatcgcagtgggtgtacacccccctgtgatatggttcataatatccaatgtaggagaggatgatattactttccatatcgcggagagtgtacatccccctgttatattgtttgtaatattcagggagaaagaggatactactactccccatatcacacggggtgtatattcccctgtgatatggttcctgatatccaagagatattataatcctctcttggattatgctacctctcatatcgcatggggtgtacacacactttgtgatatcgtttgtcatatccaaggagggagaggattatattaatcccaagatcacggggggtgtacaccctcctgtgatattgtttgtaatattaaggggggagaggataatattactcccaatataattaacaccctgtgtgtactcctccttgtaatattgttcataatatccaatgggggagacgatgatattactttcaatatcgcagaggatgtacatccctttgtaacaatgtttgtaatataaaaggcaagagaggatgatactacttccaaaattgcaggacatgtacaccccccggtgatattgttcctaatatccagtggggaagaggatgatagtagtcccaatatcgcaaagggtgtacacaccccctgggatattgttcctaatataaaaggaggagaggatgctattattcccaatatcacagaaggtgtaaaatcccctgtgatattgttcgtaatattcaggaggggagaggattatattactcccaatatcacagggtgtgtacacagggaggggcaagggccagaagcgggcgggaatccccatgtttgggcggacccagtttctaatggccagcatttgccaatcaaagcttaccagagaactctaaaagccagggctttcctgctagacaagactcatttctggaactgctttaaaaagaaacaaaacttcccaaggaccccttttcctctctgtctgcctaaaataatgttttaaaaactcctaaagcagctgaattcagcccccttcctgggggaatgtatagacggaactcccacctttcccggcatcccaaggccagagtatgtgaaactcctgggtctctatgtgtgtctgagcggctgctctgccaacactccacacagccctgtgtcctggacccaaggcccttatgacctgagctcaagaggggatctcctgatccatgggttgcaaagatccatgggagaagcatggtttctggggcggggtcacacgctcagtcactgtttccctcggatgccggagatggttcctttggctctctgccaatacagggtgaatcatcatccatccctcttttctttgttctcccgggtcaagttgtttgcctagtcagtcccaatgtgagaacctgaatatttcagttgacgcgctgacttcaaaatccccgggcttcgggaggcggagcttgcagtgagccgagatcccgccactgcactccagcctgggcgacagagcgagactccgtctcaaaaaaaaaaaaaaaaaaaaaaaaaaaaaagtccccgggcttttcttttcactcagtggaaggcagctgcttctaattggccatcttggcccgcccccaccacgtgaccttctgtaaaatgcctccactctccaggaacgctctcattatataactttgcctgaaaccaacagcacgctcattgcacatatcatgggctcatttatttcacttataaagaacctggccaaggaagagatagtgcctaaagtggccagtattctgaccgatatgttagaaaaatggtgtgccgaccaattcatgacatgtgtcccaaaactagcaacggaaattgtattcgccgtgttgaggtctctaatccagatgatgctcatctatgtactggaaaaggcagagtcctttcctgacaagctgctgaaactcttcagaaacatctcatatttcctgaagaagatgatgtctggacaagcagcacaggtcgttcagatttaactttctattcatatatccagcacgatattcgcacaattgtcacgaaaccttaccagttgatgagtcctgcacatttcctttaatttcaggaggaagagggtaatccggatgagttttctgacctactctgctgctgtgattaaacaaccaccaggaaattttgacgacactgttctcctgagctcctccctttcctccgggaacaaaacaattgaatttacaaaaataaagtgttatttgactggagtgaggtctcatgtctgcttatgcggtggctcgctgctcagaacagggtgagtctctgggttgtgtgctgaggaggggaggctctcaatctggagaaaacccactgcaggggacacctccatggggtctgagggactgaggatgaggagccggactgggtctagggaaggaggaggtttcagagggtgaaattctggcactaaagcctgggggtgtttgggaacttcctccttccgaagaagtttcagggagggataaagacaaaccctgggctccttgaggggcccttactaatttgagaggactctatcgggaaggagagtgacaatggcctccttgaggactgaggcccctgaataaatgaggcccagatacagtccatgggggatgagaccttcaagggtcacattttggttgggacagaggaaaagtgcagctctgcagccgcagaggaaaacccggcagtgtgaaagcgaccttggaggggccctgtgcgctctgaatgcgtctgagcccccatcccctgtccccgcctctctttctggattcttccagctcggctgtctccgccatcttctgagcgctccaccctgacttattcaagtttcccttctgccttccaagtactccaaaatctttcagatctgtgtccctacccctgtttttagcatgtgttggggctccaggtccctgaaggtttctggcctgaaatccacctccccagcggagtggactgcgttctagagactccacactccgcgaggttcccaggcccctgagggacaaccgagtggcctgcgcacttcagggctccacactcggcaaggtctttcaagcccttggggtccccttcttagttttttccacctttctgggctgcagtcactccataaatgctgggatctgatccccacccccactctcgtttcctcaattctgcgggctacacgctctggcaaggtcctccgggccctggatcccctccctctccctatgcccacgctcctagtcagcccttctggggtccactattttcaggaactaaccgttctcatggagccttgctaaccggaaagctgtgtggaagaaaggctttgaggatagaggtggagatttggctcttccatagtgccactcacccaccccaccatgctgccactgccagacccggacccctgtttcagaacaagtgaccagattcgctcctggacagccctggacactggccttttctctgaaaactactcaccctttctctagtccccacttcatgccagcctcataccctcttccttcccccacgctggcttccgggatcctcctctgctcagacaacctcttctgtgtcccacccccgtttttagaatgctttggggcaccaggttgggggaaggtttctggcctgatatccatctctttccaaactcccttcttcccttgaaaggcttcttgccttcagccccacttctggctccgaggtttcaggacaccctcctcttcatcctcattcttttgaccaccagctttttaggaattcgaacgtccctctcatcttcgtgaatcctgtccaggcatttgttgaccccttcatctgatacccctgacctcacattgccaaaagtctacccctacccagtacactggaattagacaaaatcccaggagttttacctcaactctgagtgtgcccacaggagctctccctgaagccacgtccttttaagcagggtctagggttcctcccttgtcttaatgaactctttgtcacacggaggacgttatggagcccttatgatctttcactgcctttctgcccagcgttttgtctttccatggacatttataatattttccatggacattttgttctctcaatgtccacccctaatttccaacatcccaaagattctcatgtgtttcctgaaagccatttacaggaatggctgtgcccagacccccttccccaggatcctccttcacacctggtaggtgcctctcctagagagatttgcactcagttgtcgtgcagtcacatggcccagatggttgttaatcacccccttcctggcaacagctagcagccagggaatcactggcacagaaacctcagggtgaccaagatgaggccacctctgtgctgaaggctgtgctccagagcctgcttgggatcaggcttaagcaggtcttcagccagacctgatgttacctggtttccttgagctgccctgcctgagctatcgggagcactccctcaatgcacatcttgattccctatctcatgctctgcttctagaaaccatgagctatcaattgctactggcaatggtcctgggaagtcaaccctaagtatggattctggggttggatgactccccacaggacttcagtgagcaacaatcactgctggcagttggaggacagagtcgctagggcatgtgaccactgtgaaaccaccgatgtttcacctggggtaattttggatgaactacggtagaagcactgaaggtacattgcttttggtttggaagattgtaggtaaataatagcgatatgaatgtggaattggatggctgcaaacgagtgccattgatgcattgaaagaggaaaagtcaggctgtcacctgtcactcagcaatttaaagtgtgagagttgggactagatgtggtggctcacatctataatccagagattcgggggaagcttgaagaggtaggatcttttgagtccaggagttccagaccagcctggacaccagagcaagacctcatctctacaacaaaattttcttaaaaattagatgggcttggtggcacgcacctgtacttgtagatctagctaatggggagcatgagataaaaaaatcacctgagtcagggacttaggggttacaatgaggtatgattgtgccagtgcacacactcccacctggccaacagagtgagattctgcttccaaaaaaataagaaataaatcaggtttgagagttggaaagcatcatcttctcctagagccaaaggacatgtacaactgagacccaggaacaaagcttcatcacaaagagaccatcatcagtggagccgggagatgcattccccctcaccctgccttgaggaggcagtggagtcatctgtctgggatcctttctgacccagccctatttgtttgtctctttggcttctttggatttgtatattttagctgttataacactgtaaaacaaacagagtgatttttttgagttgtgtgaatgatgctagctccatagtcaccctgagagtgatgggaacttttgaatttgtggcaagttggagggtagtgtaagtgacctgagattgccaaattggggctagcactggatgtgaggttaggctagtggaaaaatatgcccagaaccagaggagtgtgggctcactgcaggtggttaggctcagatccaaattgtacagatggatagctttggggtaaagaataacatagttgagaagtgcatgtgttagtctgttcatgcactgctataaagaattacctgagactgggtaattatttataaaactcaggtttaattgggtcatggttccacaggctgtacaaaaagtatgatgctggccatcagctcaacttctggggaggccccagaatagttagagtcatggcaaaaagtacaagggaagcaggctcatcttccacggccagagctggagcaagtggtaggagaggtgatacacactttcaaacaagtaggtcttttgagaactccatcaccggacagcacctatgggatggtgctaaattattcatgaaatatccgcctccataatccactcaactgtcaccagcgcagccagccccacctccaacagtggggattacaattccatatgaggtgtgggtggggacacagctccaacctcaatcagtgggcatcctggattgggtctactatagaaggagaaccaggagctgactatgatcttgaaccctacccatgatggccgggcggggtgactcatgcctgtaaccccagcactttgggaggctgaggtgggtggatcgcctgaagtcaggagttagagaccagcctggccaacatggtgaaaacctgtctctactaaaaatacaaaaaattagaccggcgttgtgctggatgcctgtaatcacaccactacgctccagcatgggaaaaaataccaaaacttcgtctcaaaaaaaaaaaaaaaaaaaaaaaaaaaaagactgcccatgaccactgcaccagtgagagggacaccagcatcactgagatgcaagggctggacattcttcataggtcagagctcaaagcaggggacactgatacagagatgggctccatccatagcaccaaagtggtgagaggatgtgggaatggcagaggccagcactttgccatcaatgcaagggggtataaggaggtgacaccagtgccagagtacatcacggggggactgccctacaatatctaggacttacctcttagagcgtgtttcattagcgacaacagatataaatggcagacaggtgtgtccctgcattaacaggaaatagaaatcatcaagaggaacagaaggcagatgtcagcagccccttagaaagtcatcatccttcatacagttaaaatctgagacagttctcacacgagaaggcctaactcaaaaagaggctgggttctcatgaggcaggtttatgcaaaaccaaggaaggtgtacaagtttggaattctccagtttcccttggaaaagacctacagtcatttgcttaggtaactgagcactgaacaaaggtgagtattgttgtcttttagaagctcttggccaagaaggccttgttggcataaaacccatggtttggaaacatcaccatgacccctgttagagtaatggcctaagggtgggggtcaggaaattgatgtattccttgccaacttctgcctctaagtgagtgaactctgtttgtgaacctctctcctctgtggttatgttcctaggctctcatgtataatcaggagtcatagacttagaaacaggaaaaatacttacagtgtttttgtggcctgtgagctatgacttataattttaggaaaaaaacaattgcaaatggaaagcctaagtctatcaatgctcatccaagacaacataatcaataaaaaccaatatcaaatctcaaggcaaattatttcctgtatatagatggcagagatgagcaccaccatcaaaaactcaaggaccagtgctgtgggtccagtcatctgtttcatggaattcaccagtctggtatcttcaaaatccagaaggatgatggcagatggcaggaaagtaatgcaaacgtcatcaggtgtgaccccactgtagcagctgtgatggatgttttctctcaccatagcaataaataacacaacctcggtcacactgtatgcattgttggtctgcaaaatccatgttttgcaaaactcttcaggaaggtggatctgtaatattggcattgacatgagaacaacagcagtatttattcacaatctcaagctctctgtcttcccgtctctctcattagccatccaagtagtcctgaggaaccaagcccatcagaacattctgcaacataatacacagctccattctccattcaaattttgttgttgttgttgttgttgatgagacaacatcttactccatcagccaggctgacgtacagtggggctatctgggctgactgtagtcttgagcttccaggctcaaggcatcctctcacctcagcctcctaagtggcttgaactacagacacacagcgacatgctgggctagtttttgtatattttgtagagacgtgctctcaccatgttattcaggctggactcaaactcctgagcgtaagtgatccaagcaccttggcctcaaagtgctgagattacaagcctgagccactgcacccagcccaatctccattctactgataacaatgtcattaccaggtctgatggacaggaaatggtaaggtttctgaaaacctaaggatcacacagcgagttccaaaggctgaaagtgcatacctgtcgacactgataccaatgacatccaatggtgagaatgacattccttgtagtcctagctctgctcataacaaatctatactgaagtgtaagagtttgatggtcatggggattttccatgtctctgcctttcagcgatgtgccatatctgtgaagtgttcagaaatgcaacagcctgaggcatgctgggcatatcctctaataaaaaggaaaatgccattttatggtcctgtatttctacaagttggaacacatgggcctgtgatccagatgggggaaatgggaatattcccactcattcaccttcatccacgaagcccatttgaaagctttgggcttcccatccttgtagattttagtgttgtgggctgggtgcagtggctttcacctgtactgccaacactttgggaggcctagacaggtgaatccactgaggccaaaagttcgagaccagcctggccaagatggtgaaaccccgtccctactaaaaatacaaaaattagcaaggtattggggccagcacctgtaatcccagctgctcgggaggctgaggctggagaatcgcttgaacccaaaaggcagagactgcagtgacccgatcctgcctttgcactccacctgggcaagcagaacaaaacttctgtcttgaaaaaaaaaacaaaaaacgaacaaaaaagatgttagagttctgggtttagaggtctataccccagaaagagaatggtttcaacaagggacaaagaagttgctttaaacgttgacttgccatttcttttcagtgtgtttgttctcttgcgtcaagagaccaccagaaaagtggtgcaattactctcctgtcaagaatcattgactatcatctgcaagagggtcagatcctggtatataattagggcagaaatacttagtctgagaagggtatgacatccagaggccctattaatgatgtccttttctccatgcctgactctgaccccatgtgctggactgcccctgtgtggatggcctcatggcctgctcggactctgaggtcccaccccaagtggcacctccatggagggctctactcttgtatgggctctgacactcacactgagacactctcccatggacacctcttcacccacttggggtctgaaactgggctactccatccctccctaacctggaacagagagctttcactgctattacacaagtcatagaggctaactcctcatttttccaagctaattattgaaacattagtcctgggttgataagacaagataagttaacttttcataaatttgcttatcaagttttgaataaattcaaataaattcaccttccccacacaccttagttgtcgacatcacacgcgcacccatactcacagggtgagcacgaaggcttcactgtcagtggagaaagtggcaaaacccttctgtgcctcatcctggtctagacctggccctcatcctttcccactcttcccctcactcccttggattcatccacactggcctcctgcctgctgctccacctccctgcgaagctcacccctgcctcagggcctttgcacgtgcagtggcttcaagccatatcctcttcacccagatctcccagatctcctgaatgatcttcttttatcattcaggtctcagcttgcatgtaatcttctcagtgaggattacccaaaccacatagttcattcattcattcaaatattcattcaatggcatattgacaaagcagctacttcatgccaggccttgggccaggtgttatggatatggcaacaaacaaaacaagagttttctgctctcaaatttttacccacttaaaggagatatcatacatcatctgtaaataaatacatcatctgtaaataatgatgtaaataaatacatcatctgtaaatctgtaaataatgatgtaaataaatacatcatctgtaaataaataaagtataataaaagaaaatagtaggtttttttggttggaggtgaccgtgaagtttgcaaataccatcttacaacacattattttattttatttcatttcatttttaattttattattattatactttaagttttagggtacatgtgcacaacgtgcagatttgttacatatgtatacatgtgtgaagttggtgtgctgcacccattaactcgtcatttagcattaggtatatctcctaatgctatccttcccccctcccccaccccacaacagtccccggtgtgtgatgttccccttcctgtgtccatgtgttctcattgttcagttcccccctatgagtgagaacatgcggtatttggttttttgtccttgtgatagtttgctgagaatgatggtttccagcttcatccatgtccctacaaaggacacgaactcatcattttttatggctgcatagtattccatggtgtatatgtgccacattttcttcatccagtctatcattgttggatatttgggttggttccaagtctttgctattgtgaagagtgccgcaataaacatacgtgtgcgtgtgtctttatagcagcatgatttataatcctttgggtatatacccagtaatgggatggctgggtcaaatggtatttctagctctagatcactgaggaatcgccacactgacttccacagtggttgaactagtttacagtcccaccaacagtgtaaaagtgttcctatttctccacatcctctccagcacctgttgtttcctgactttttaatgatcgccattctaactggtgtgagatggtatctcactgtggctttgatttgcatttctctgatggccagtgatgatgagcatttcttcatgtgttttttggctgcataaatgtcttcttttgagaaatgtctgttcatatccttcacccactttttgatggggttgtttgtttttttcttgtaaatttgtttgagttcattgtagattctggatattagccctttgtcagatgagtaggttgtgaaaattttctcccattctgcaggttacctgttcactctgatggtagtttcttttgctgtgcagaagctctttagtttaattagatcccatttgtcaattttggcttttgttgccattgcttttggtgttttagacatgaagtccttgcccgtgcctatgacctgaatggaaatgcctgggttttcttctagggtttttatggtttgaggtctaacatgtaagtctttaatccatcttgaattaatttttgtataaggtgtaaggaagggatccagtttcacctttctacatatggctagcctgttttcccagaaccatttattaaatagggaatcctttccccacttcttgtttttgtcaggtgtgtcaaagatcagatagttgtagatatgtgacattatttctgaggactctgttctgttgcattggtctatatctctgttttggtaccagtaccatgctgttttggttactgtagccttgtagtatagtttgaagtcaggtagcatgatgcctccagctttgctcttttggcttaggattgactttgcaatgcggggtcttttttggttccatgtgaactttaaagtagttttttccaattctgtgaagaaagtcattggtagcttgatggggatggcattgaatctataaattaccttgggcagtatggccattttcacgatattgattcttcctacccatgagcatggaatgttcttccatttgtttgtatcctcttttatttcattgagcagtggttttagttctccttgaagaggtccttcacatcccttgtaagttgggttcctaggtattttattccctttgaagcaattgtgaatgggagttcactcatgatttggctctctgtttgtctgttattggtgtataagaatgcttgtgatttttgtacattgattttgtatcctgagactttgctgaagttgcttatcagcttaaggagattttgggctgagacaatgggttttctagatatacaatcatgtcgtctgcaaacagggacaatttgacttcctcttttcctaattgaataccctttatttccttctcctgcctaattgccctggccagaacttccaacactatgttgaataggagtggtgagagagggcatccctgtcttgtgccagttttcaaagggaatgcttccagtttttgcccattcagtatgatattggctgtgggtttgtcatagatagctcttattattttgagatatgtcccatcaatacctaattattgagagttttcagcatgaagggttgttgaattttgtcaaaggccttttctgcatctattgagataatcatgtggtttttgtctttgggtctgtttatatgctggattacatttattgatttgcatatattgaaccagccttgcatcccagggatgaagcccacttgatcatggtggataagctttttgatgtgctgctggattcggtttgccagtattttactgaggacttttgcatcaatgttcatcaaggatattggtctaaaattctcttttttggttgtgtctctgcctggctttggtatcaggatgatgctggcctcataaaatgagttagggaggattccctctttttctattgattggaatagtttcaggaggaatggtaccagttcctccttgtacctctggtagaattgggctgtgaatccatctggtcctggactgtttttggttggtaagctattgattattgccacaatttcagatcctgttattgctctattcagagattcaacttcttcctggtttagtcttgggaaggtgtatgtgtccaggaatttatccatttcttctagattttctagtttatttgcgtagaggtgtttgtagtattctctgatggtagtttgtatttctgtgggatcagtggtgatatcacctttatcattttttattgcatctatttgattcttctctctttttttctttattagtcttgctaccggtctatcaattttgttgatccttttaaaaaaccagctcctggattcattaattttttgaagggttttttgtgtctctatttccttcagttctgctctgattttagttatttcttgccttctgctagcttttgaatgtgtttgctcttgcttttctagttcttttaattgtgatgttagggtgtcaattttggatctttcctgctttctcttgtgggcatttagtgttataaatttccctctacacactgctttgaatgtgtcccagagattgtggtatgttgtgtcttttttctcgttggtttcaaagaacatctttatttctgccttcattttgttatgtacccagtagtcattcaggagcaggttgttcagtttccatgtagttgagcggttttgagtgagtttcttaatcctgagttctagtttgattgcactgtggtctgagagacagtttgttataatttctgttcttttacatttgctgaggagagctttacttccaagtatgtggtcaattttggaataggtgtggtgtgatgctgaaaaaaatgtatattctgttgatttggggtggagagttctgtagatgtctattaggtccgcttggtgcagagctgagttcaaatcctgggtatccttgttaactttctgtctcattgatctgtctaatgttgacagtggggtgttaaagtctcccattattattgtgtgggagtctaagtctctttgtaggtcactcaggacttgctttatgaatctgggtgctcctgtattgggtgcatatatatttaggatagttagctcttcttgttgaattgatccctttaccattatgtaatggccttttttgtctcttacgatatttgttggtttaaagcctgttttatcagagactaggattgcaacacctgcctttttttgttttccattttcttggtagatcttcctccatccctttattttgagcttatgtgtgtctctgcacgtgagatgggtttcctgaatacagcacactgatgggtcttgactctttatccaatttgccagtctgtgtcttttaattggagcatttagcccatttacatttaaggttaatattgttatgtgtgaatttgatcctgtcgttatgatgttagctggttattttgctcattggttgatgcggtttcttcctagccttgatggtctttacaatttggcatgtttttgcagtggctggtactgactgttcctttccatgtttagcgcttccttcaggagctcttttagggcaggtctggtggtgacaaaatccctcagcatttgcttgtctgtaaaggattttatttctccttcacttatgaagcttagtttggctggatatgaaattctgggttgaaaattcttttctttaagaatgttgaatattggcccccactgtcttctggcttctagagtttctgccaagagatcagccgttagtctgatgggcttccctttgtgggtaacccgacctttctctctggctgcccttaacattttttccttcatttcaactttggtgaatctgacaattatgtgtcttggagttgctcttcttgaggagtatctttgtggcattctctgtatttcctgaatttgaatgttggcctgccttgctaggttgcagaagttctcctgggtaatatcctgaagagtgttttccagcttggttccattctccccatcactttcaggtacactaatcaaacgtagatttaatcttttcacatagttccatatttcttggaggctttgtttgtttctttttactctctttcctctaaacttctcttctcacttcatttcattaatttgatcttcattcacttatatactttcttccacttcatcaaatcggctactgaaggtattgcatgcatcatgtagttctcatgccatggttttcagctctatcaggtcatttaaggtcttctgtacattgttttctctacttagccattcgtctaatcttttttcaaggtttttagcttccttgtgatgggtttgaacatcccctttagctcagagatgtttgttattactgaccttctgaagcctgcttctgtcaacttgtcaaagtcattctccatccagctttgttccattgctggtgaggagctgcgatcctttggaggagaagaggtgctctggtttatagaattttcagcttttctgctctggtttctccccatctttgtggttttatctacctttggtctttgataatggtgacctagagatggggttttggtgtggatgtcctttttgttgatgttgatgctgttcctttctgtttgttagttttccttcgaacagtcaggttcctcagctgcaggtctgttggagtttgccggaggtccactccagaccctgtttgcctgggtatcaccagcggaggctgcagaatagcaaatattgcacaacagcaaatattgctgcctgatccttcctctggaagcttcgtctcaaaggggtgcctggctgtatgaggtgtcagttggcccctactgggaggtgtctcccagttaggctagatgggggttagggacccacttgagaaggcagcctgtccattcacagagctcaaacactatgctaggagagccactgctctcttcagtgctgtcagatggggatgtttaagtctgcagaaatttctgctgccttttattcagctatgccctgcccctacagatggagtctacagaggcaggcaggcctcattgagctgcggtgggctcctcccagttcgagcttccagaccactttgtttacctactgaagcctcagaaatggtgaacacccctcccccacccagtctgccgccttgcagttccatctcagactgctgtgctagcagtgagcgaggctccatgggcgtgggacccactgagccaggcacaggatataatctcctggtgtgccatttgctaagaccattggaaaagcacagtattaaggtgggagtgtcccaattttcccagtacagtctgtcacgggttccctcatctaggaaaggtaaatcccctaaccccttgtgcttcccggtgacgcaatgccccaccctgcttcagctagccctccatgggctgcatccactgtccaaccagcccaatgagatgaacaaggtacctcagttggaaatgcagaaatcacccatcttctgtgtggatcaggctgggagctgcagaccggagttgctcctattcggccatcttggaatggcaatctatgtttgctttttacatttgaaaaaactggtgtcacgtacctaggtattaatcattgtggtatcctcttgccgatttacctctttatcattaactagtgaccctccttgtcttttgttgttacagtctgtgattttagtctattttatctaatatgagaatagctactctggcacttttttggtttccagcttcatgaaatatccttttccatttccctgttttcatttccctttcggtgtctctatagatgaagttgatttctttaaggcaccataagttgggtcttatttctttatccatttgaccatttagagaatttagaacactgtcagtgttattattcataagtaaaaacttaagagtgggtgtagtggtgtacatctgtatttcctgcactttgagagactgaggcgagctgatctcctggggtcaggagtttgagaccggcctggtcaacatgatgaaaccctgtctctactaaaaatacaaaaattagccaagcatgctggcatgtgcctgtaatccaatttacttgggaggctgaggcaggagaagcttgaacctgggagacaaatgttgcagtgagctgagatcacacagagaagtcatctccactctcctcatcagaacctcttgttcacagcatttgtgagcacaaatcaatgatggttattctttcctactaattagggatattttattacacagcaatagcctccagcaaagggaaccatcatacatgattcctacaagttgacagggctggaattatcactgaaaaactaaggtggctatacttgattcccaatgtccaatttttcatgaatagagaaatttatcctttttccccccagccagaaaccaagttttgctcttacgcccaggctggaatcaagtggcacaatctcagctcactgcaacctctgccccccagcttcaagaaattcaccttttgaacaaggagatattaaggatacactatgtgtatgctaccggtggttgcaggagactcagaaaagagagaaacagtcactggcctcgtgcaactgatattctcgggaggagagaaaggcaatcaagaaagaaacatgctgtatttcagacagctgtaagtcctccacaagaaaagaaagcaggtgaggaacataggaaatgtgtcaaccataaggttcccgctaattctataagttggtcagggatatcctccaagaataagcagcatctgagcaatcacctgaagggaggaaggaaggaagactgtgagtggtggcttacacctgtaatcccagcactttgggaggccaaggagggcagattgcctgagctcaggagttcacgaccactcagagcaacctgttgatacccaatctctactaaaaacacacaaaaaaattacccgggtgtggtggcacgcacctgtagtcccagcttccatgcccagctgatttctctctctccatatatatatatatatacacatatattgtttttgcagagatagggtctcactgtgtcacccagtcatcaagcaattctcttatactgttttggaaaagcatgggaattacaggtgtgaaataccctgctggtcctgaaaaatgtgatatttgggattctctgcctggcttgttttacccaaaataatgacctccagttccttccaggttgctgcaaaagacatgattttcactgttttataactgaatagtattcctgtatgtatacataccacattttctttatttattcttctgttgattgacatgtagggtgattccatgtctttgctactgtaaataatgctgcagcaaatatttgtgtgcattttgatctattcctttgagtaggtacccagtactgcaactgcaggactgagtagttgttatattttttgttctttcagaaatctccatagtgtttgccataaaatctgcactaatttacattcccaacaacaatgcataagatttccccttttctccacattctcactaacatttgttatgtttttgtctttttcataatacccattctgactggagtaagatatctcattgtggtggttgttgatatttttgagacggggtctcactctgttgccagactggagtgcagtggtgtgatcgtggcttgctgcaacctccacctcccgggttcaagcaattctcctgcctcagcctcccgagtagctgggactacaggcgcgtgccaacaggcctggctcattttttgtatttttagtaaagacagggtttcaccatgttggccaggatgatcacagtctcttgagctcatcatacacctgcctcagcctcccaaagtgttggaattacagtcatgaggcagcgcacccaacctcaatgtggttttaatgaccatttctctgacgattcatggtgtggagaatttctttgaaataccttttggccatttatatgtgctcttttaaaaactgactcctgtccaggtgcggttgagcatgcctgtaaccccagaacttcgggaggctgaggccaatggatcacttgaggcaaagaggcagaaatcagcctggccaacaaggcaaaaccccatctttactaaaaatacaaaaaatcagccacgggctgtgactcgtgcctgtggtgcaagttactcaggaggttaaggcacaggaattgcttgaacccggtaggcacaggtcacagtgagccaagatcatggcactgcactacagcatgggtaatagagaaagacctgtctcataaaaacaaatgaataaataaataagataaaaaataaaaaagtctctttatgtcctttgccgactttttaatgggattctttggagttttctgttgtagttgagatctttgtttactctcggtattagtcttttgtcaaaggaaaagtttacaaataatttcttccgttctgcagtttgtctgctcactctgttgagaggattatttctttggctgtgcagcagctttttgtttcagtaaagcttttgaatttatataattaaaattttcagtttggtttaaatttgcactggtcgatttttggttttgttgcctgtacttttgaagtcatactcttgaactctttactagacaataaccagaagagttttctctagttttcttctcacatttttattatttcagtacatatatttaagtctataattcatcttcaattgatttttgtagaaatagtgagaaataggagtccaggtttattcttctgcaaatgacaattcaattgttccagcaccaattattgaaaagggtgtgctttcctcaacgtatattcttatcagctttgtcaaagatcagttggctataaatgtgtggctttctttctgggctctctagtctgttacatcaatctgtgtgtctatctgtatactactaccatgctgtattggtgatgatggctttgtaatataatttgaagtcaagaaatgtgatgctcccagctttgtttatttgcttcagaaaggctgagtcaacagctgcagagatgaagctgcccctcctcgcagggctccttcccggaaaaagatcatggctcccactgaccatataaccatggctggaactcctgaaattcccaaagggaggccctacccagtgaggggggatgaatgaaggtcctacttaaggaatctgtctggccacaatcaggcacagcagctgtgctgccttgtgggggaccagaccacctggattccctggagcctgcaggctagaatgtctgagtccatggaaacacagaaatggaggccgccctcacctccccagaaaactgtagtctcaggcagtctccagccgattgccactggttggctgctattccaagccagtgggtcttaacttgagaggtgctgtggaagtggggcccacggaatgaggctgcttggctccctggattcagccccttttctaagggaatgtacagatggaactcccgccttgcccagctttccaagtatataaaactcctgagtctctgtgagtgtctgagcgagtgctctggcaacattcgacacggctctgtgtatctgacccaagacccttatggcatgagctaatgggaggatcttctgatccatgcgtggcaaagatgcatgggagaaacatggtttgtgggtaggggttgtgcattcactactgcttctcttggctgtaggtgaaggtttctttggctctgtgctgatactgggtgcaccatcacccaccccctttgtttcttctcctgggtcaagtcatttgcctaatcagtcccaatgtaggaacctggatacttcagttcaaggtgctgaattcaccgtgcttttcattcaggggaagacagctgcttctcattgggcatcttggcctgcccacttcacgtcactttttgtaaaatccacaccactccaggaatatccattacttaacttcgcctgaaataaacagaaggctcattacacttatcatgggctcacttacttcgcctataatgaaggtgccatggaaatgctagtggatgacgtggtccattttcttagggatgagatagaaaaatggtgtatggctttttaatttaattaaaatttttagtttggtttaaatttacattggtctctttttggttttgttgcctgtacttttgaagtcttactcgtgaactctttactggacaatgaccagaagagttttccctaagtttcttctgatattttgaccatttcagtacatacatttcagtctataattcactttaaattgatttttgtaaacatggtaagaaataggagttcagatttattcttccgcatatgataatgcaactgtcccagtaccaattattgaaaagggtgtgctttccctagtgtatattcttgtcagctttgtcaaagatcagttgcctatgaatgtgtggctttcattttggattctctcgtctgttacatcaatctgtgtgtccacatttatacctgtaccatgctgtattggtgactatggctgtgtaatatattttagagttaggaaatgtgatgctcccagctttgttcatttgcttcagctgaaaaggttgagtccacaattacaaagatggcagccgcccatccccggaggacctccaacccagaaagagatcaggcttcccaccaaccctataaccctggctggagttcctgaaattccaacagggaggaccttcccagtgaggagggatgaatcaaggtcaaatttaaagaaacagtctggccactatcaggcacagcagcagtgctgccttgtgggggacccctcctgctccagaccagctgccctccctggagcccgaaggctagattgtctgagtctacggaaacagagacggtggccgccccaaccacccagaactcggtagtctcaggcacttggcttgctatcttgccactgcttggctggtattccaagcccgtgggacttgagaagtgctgtgatgatggggaccacaggatgaggctgtctggctccctgtgatatggctgtgatgagtggaggaacaccagggctcatgtctcacacagaattggagaaaatgacacaaacacatgtacagtggttttatggcgtgcagtttaataggcaagaacgaaggaagagctccccatactgagacagagggaggggggctccaaagccaaaagaggaaacccggagtgctgtggataccaatgagttatatgaagaaactggagggggcggtgtctgatttgcatagggttcaggcgattggttcgaccaggcatgtcatttatgtggcccacggaaaaactggccctcccacctagcctttgaatatgcacgtgccggacaccctgatttcctacactcatggggatatatgggggtggccatatcgccaggcacaggtggggacaagggccagaagagggcgggaatcgctatgtttgggtggacccagtttctaatggccggcatctgcagatcaaggttaccggagaactctaaaagccggggctttcctgctagacaagactcatttctggagctgctttaaaaagaaacaaaacttcccaaggaccccttttcctccctgtctgcccaaaataatttcttaacaactcgtataacacctgaattcagcccccttactgggggaatgtaccaacggaactcccacctttcctggtttctcaaggctagattgtgtaaacctcctgggtctcggtctgtgtctgagcagctgctctgccaacactccacacagccctgtgtactaggcccaaggccgccgtgactcagcccatgggaggatctcctgatttcttggttgcaaagatccatgggagaaaaatggtttctggggcggggtcacacactcatggcttctcttggctgtgcaagaaggttcctttggctctgttccaatatagcgtggttcatcacccacccctgttttctttgttctcctgagtcaagttgtttgcctagtcagtcccaatgtgagaacctgaatatttcagttcacgtgcttatcgtgaaattcactgagactttaattcagtggaaggcagcctcttctaattggccatcttggcccgccccctccacgtcacctcccataaaatggccacgctctccagggacgatgccattatatatctttacgtgaaaccgacagaacacttattacactttttgtgagctcatttacttcacttataatgaacatggccatggaaatgctagtggagaaagtggtcgattttctgatggatgtgataaaaaaatggtttgccgaccaattaatgacatatgtctcaaaactagtaacgagacccttaatcgctgggttgaagtttctaatcaagaagatgctcatctatgtattcaacaaagcagcttcccttgcttctgaaatgcttccaaacaacatctcatatttcctgaagaagataatgcctggacaagcagcacaagtcattcaggtttactttcagctcataaatccagcaggatattcgcacaattgttgggaaaccttatcagttcatgagtcgtgcatgtttcctttaatttcaggaggaagagggtaatctggaagagtttcctgacctactctgctgctgtgattaaacaaccaccaggaaattttgatgacactgttctcctgagctcctccctttcctcggggaagaaaagcattgaaactacaaaaataaagtgttatttggctggagtgaggtctcatgtctgcttatgcggtggctcgctgctcagaacagggtgagtctctgagttgtacgctgaggaggggaggctgtcaatctagaaaaaacccattgcatgggacacctccatggggtctggggggctgaggatgaggagctggactggatctagggaaggaggaggtttcagagggtgaaattctggcagtaaatcctgggggtgtttgaaaacttcctccctcagaaggagaagactcagggaggaataaggacaaaccatgggtcccttgaggggcatttactaacttaagaggactttatcgggaagcagagtgacaatggcctccttgaggactgaggcccctggataaatgaggcccagatccagatccagtccatgggagatgagaccttcaagggacatatttttgttgggacagaggaaaagtgcagctctgcagctgcagaggaagccttggcagtgtgaaagcgaccttggagggggccctgtgcgttctgaatgcttctgaggtccatcccctgtccccgcctctttttctggattttttgggctccatggtctccgccatcttctgagcgctccacgctgccaccttcagttttctcttctgggctccaaatactccaaaatctttcatatctgtgcccctacccctgtttttagcatgtgttgggactccaggtccctgaaggtttctggcctgaaatccacctccccagcggtgtggattctgctctagagaccccgcacttggcaaggttcccaggcccctgggggacaaccgagtggtatgtgcacttcagggctccacactcggcaaggtctttcaagcccttggggttccctcctcagttttcttcacatgtctgggatgtagtcactctataaatgccgggatgtgatccccaccccagtgattttttttagttccatgagtgttgctatctgaatagtcatcctgagagtgatgggaccttttgaatttgcagcaagttttagattagtgtgagtggcctgagatcgcaaaactggggctagcattggatgtgaggttaggctggtggaaaaatttgcccagaacctgaggagtgtgggctcactgcaggtggttaggatcagcacagaattgcaaggatgtatagctttggggtaaagaataacatggttcagaagtacatgtattagtcttttcatgcattgctataaagaattacctgagactgggtaattaattataaaaactcaggtttaattggctcatggttccacaggctgtacaaaaaggatgatgctggccatcagctcaacttctggggaggcgtcagaaaacttagagtcatggcaaaaagcacaagggaatcaggctcatcctccatggccagagctggagctagtggtaggagaggtgctgcacacttttgaacaatcagatctttttagaactctatcaccagacagcacctagaggatggtgctaaattattcatgaaatatccacccatatgatccactcaattctcaccggcccaaccaggaccacctccaccattggggattacaattacacatgagatgtgggtggggacacagatccaaactcgatcagtgggcatcttggactgggtctactatagaagaagaaccaggagctgactatcatccttaagactgcccatgatggccaggcagggtggctcatgcctgtaatcccagcactttgggaagccaaggtgggtgaatcccctgaggtcaggagtttgagaccagcctcgccaacatggtgaaaccctgcctctactaaaaacacaaaaaattagatgggtgttgtgccagacgcctgtaatcacagctactccagaggctgaggcatgagaattgcttgaacctgggaggcggaggtggcggtgagccccaatcgcactgctacactccagcatgggcaacaataccaaaacatcgtctcaaaaaaaaaaaaaaaaaaaaaaaaggctgcccatgaccactgccccagtgagagggacaccagcatggctaagatcaagtgctggacattcttcatgggtcagacattaaagcaggccacactgttacagagatgggctccattcatagcaacaaagtggtgagaagatgtgggaatggcagaggccagcactttgccatcaatgcaaggtgggcataaggagctggcaccagtgccagagtgcatcaggggaggactgctttgcaatatctagcacttacctcttagagtatgtttcattagggacaacagatataaatggcagacaagtgagtcccttcagtaacaggaaatagaaatcatcaagaggaacagaaacagatgtcagcagccctcatataaagtcatcatccttcatccagttaaaacctgagacagttctcacataagaaggtctaattcaaaaagagactgggttctcatgaggcaggttcatgcaaaaccaagggaagtatacaactttgggattctccagcttcccttggaaaagacctacaatcatttgcttaggtaactgagcactgaacaaaggtgagtattgttatctttcagaagctgttggccatgaaggtcttgctggcataaaacccatggttggaaacatcaccatgacccctgttagagtaatggcctaagggcaagggtcaggaaattgatgtattccttgccaacttctgcgagacgagtgttggtccactcatctctttcacggaattcaccagtctggtatcttcaaaatccagaaggatgatggcagatggcaggaaactaatgcaaacaccatcagttgtacctccactgtagcagcagtaatggatgttatctcttcattgtaatatccagggagggagaagatgacattattctcaatattctaaacaccctgtgtgtacagcctctgtgatattttttgtaatatccgtgtgggagagaattatattactcctaatatctcaggggttgtgccccctctgtgacaatgttcctaacacccaggaggggataggatgatatcacttttagcatcacagggggtgtacaccccactgtaatattgttcataatatccgggggggagagaatgatattactcccaatatcgcaaagactgtacaccaacctgtgatattatttgtaatatccataagaggaagaataatattactcccaatgtcacaggaagtgtacacccttctgtgatattgttcaaaagatccagttagggaggggatgatattactctcaatatcttaaacaccctgtaggtaagccctctgtgatattcctcataatatccagagggagaggatgatattactcccaatattgcatgaagtctacaccccacctgtgatattgttcctaatatccaggatgggagaggatgatattactcccaatgtcgcaggggatgtacaccttccctgtaatattgttcgtaatatctagaaaaggagaggataatattactttcaacatcgcagggggtgtacaccttccttgttatattgttgctaatatccagggaaaaagaagatgacattaccaccactattgcagaaggtgtacacccccccttgatatagttcctaatatccagaaaaggagaggagatattactccaaatattgcaagaggtgtacattcccctgtaatatttttcctaacattcaggaagaaagagagtgatattgcccttaatattgaagggagtgtgccccccccgtgatattgtttctaatatccaagaaatgaaaggatgatattactcccaatatcacaggggctgtacagccccctcccatgatattgttcccaacatcggggggggggtgaaatagtattattcccagtatcacaataggtgtacacacctgtcgtgatattgttcctaatacccatgggggaaaggacgatattattcttaatatctcagagggatgtacaccctccctgtgatattgttcctaatatccggggtgggagaggatgatattacccccaaaatctcaaagggtgtacacccctcttgtgatattgttcctaatatccagggtggagaggataatattattcccaatatccaggaaaggaaacgatgatgttactgtgaatattccagggggtgtcctcccctctgtgatattgttcctaatatccaggttggggagattatgatatttctccaaatatcacaaggggtgtacaccaaccctgtgttattgttcctaatatcgatggggggagaggacgatattactcccaatatcacagggggtgtacaccacctttatgatattgttcctaatatccatgaagaaagaggatgatattactttcaatatcgcaggggatgtacactccccctgtgatattgttagtaatacctaggagaagaaagtgtgatattactcccaatatcgcaggggatgtacacgcttcctgtgatattgttcctaatatttagggggaaaggggatgatattactcccaatatcgaatggtgtgtacacccccccgtgattctttttttttttttttttttttttttgagatggagtcttgctctgccgcccagactggcgtgcaatggcgcaatctcggctcactgcaacatttgcctcccaggttcgcacgattctcctgcctcagccttcggagtagctgggattataggcagctgtcaccataccaggctaatttttgtatttttagtagagttggggtttcaccatgttggtcaggctggtcttgaattcctgacctcaaataatccacccaccttggcctcccaaagtcctgggattacaggcataactttccctgtgatattcttcctaatattcaggaagaaagaggatgatattgctcccaatatcgcagagagtgtgcactcctcctgtgatatggttcttaatattcagaggaggagaggatgatattactttctatattgcagaaggtgtacacctccctcgtgatgtctttcctaatatccagtgggggagaggttattagtctcaaaatcacagaaggtgtaaacccccatttgatattgttcctaatattcaggggtggggagagaaaggtattactcctagtatttcagggcatgaacacccccaccgtgatatcattcctaatatccagaaggggaggcaatgatatttctcctaatatcacaaagggtgtacaccccttctgtgatattgtaaatattctgtgtgtacacccccctgtgttatagtctgtaatatccgggtgggggagagggtgatatttctccccatattgtaggggatgtacacccttctgtgatatggttcgttatatccagggaagaaaaaggtaatattgctgcccatattgtggagagtgtacacccccatgtaatatggttcgtaatatccaggagtggagagggtgatactgctccttacatcgaggaaggtgtacaccttattgttatatgattcgcaatatccaggggaggagagagtgatattgctccccatgtcgcagggggtgtaaaccctccgtgatatgattggtaatatccaggaaaggaaagggtgatatttctccccatatcgcgggggacgtacatcctcctgtgatatggttcgtaatatccaggaggaaagaggaaaatattgctcttcataacccgaggggtgtacaacccctgtgatatggttcgtaatacccagaagtgtacacccctctgtgatatggtttgtaatatccagggggttagagggtgatattgctccccatatcgcagtgggggtacacccccctggattggttcataatattcatggggggagaaatttacatttatcctcatatcagggggggtgtacaccccccgtgatatggttcgtaatatccaggggaagaaagggtgatattgctccttatatcgcggaaggatcaccctcccctgtgatatggttcataatacccagacgggaagagggtgatattgttcttcataaagcgaagggtgtacagccccctgtgatatggttcataatatgcaaaaggggagagggtgatattgctccccatatcacggagggtgtactcccttctttgatatggttcgtaatatccaggggtgtagatggtgatatagctcgccctattggggagggtgttcacccctctgtgatattgttcgtaatgtccagggaaagagaggatgatattactcccaatatcgcagaaggtttacaccactctgtgatattgttcataatatccagggaaggagaagacgatattactcccaatatggcagggggtgtagaactcctgtgatattgtttgtaatatccaggcaaggagaggatattactctcaatatcgcagaaggtttacacccctatgtgatactgttcatgatatccagggaaaaagaggatattactccctatatcacaaagggtgtacacccctttgtgatattttttgtaatatccaggggagagaggataatattactctcaatatcagaaggggtgaaaaccctcctgtgtcattgttcataatatttagggaaggagagagtgatattactccaaatatcacagtgggtgtacacccccctatgatattgttcctaatttccagaaggggagatatgatattattgccaatatcgcagaaggtgtacaccttactctgacattgtttgtaatatccagatggggaaatgatgatattactcctaatatcacagggggtgtacacccccttgttttattgtttgtaatattcaggggaagagacgattatattactcccaatatcgcagggtgtgtacaacactctatgatattgttcataatatccaggggaggagaggaagtgtacacccccccgtgatattgttcgtaatatccagaggtagagaggatgatattactcccaatattgcaggtggtgtacacctttctgtgatattgtcatgatattaagaaggggagaggatgatattactaacaatatcacaaaaactgtacactccctgtgatattgttcataatatccagaagaagggaggatgatattattctgaatctcgcagaagatatacaccaccctgtgatatggttcataatatcctaggggaaagaggatgacataactgtcaatatcgcagggggtgtacaattccctgtgatattgttcacaatattcagagggaaaaaggataatattactttcaatatcgcaggcggtgtacacattactgtgttattgtttataatatccggaatgagagaaaattttctcccaatatcacaggaggtgtacactcccctgtgatattgttcgtaatatccagggaggggagaggatactattactcccaacatctcagggagtgtaggccccccctttgatattgttcctaatattcggaagtggagaagatgatattacttccaaaatcgcagggggtgtacactccctctgtaatattgtttctaatattcatgagtggaaagaaagatattactcccagtattgcaggggacatacaccacactgtgatcttgttcacaatattcgggggggagaggatgatattactcccaatatcaaagtaggtgtacacccccttctgatattgatcgtaatatccagaattaaagatgataacgttactcccaatattgcagggggtgtacatttttgaatactgttcataatattaagagggggaggggatgatatctgtcccaatatcgcaaagtgtgtacacctcctgtgacattgtcccaaatatccagaggaaaaaaggatgttattactcttaatatctcagagagtgtacacctccctgtgatattgtttgtaacatccagaagaaagaggctgatattactcttaatatcgcagggggtgtacacccccgccccgggatattattcgtaatatccagggggaagtggaatgttcagaatgggagaggatgatattacttgcaatatcatagtgggtgtacaccccactgtgatattgtttgtaatatccgggaaaggagaaaatgacattcctccccatatggcaggggctgtacaccacctatcatattgttcaaaatatccagaaggggagaggatatgtctccaagtatcacagggggtgtacaccccgctgtaatattcttcctaatatccagggtgtgagaggataatagtactcccaatatcccagggcatgtacaccccccttgtgatgttgttcctaaaattcatggggagaaagaatattactcccaatatcacagggggtgtacatacactctgtaatattgttgccaatatgcagcaggagagaggatgatattactcccaatatcacaggggctgtacaccccgctgggatattgtttctaatatcaagggggaaaaaggatgatattactcccaatgtcgcagggtgtgtacttcctctttgtgacattgttcctaatatccaggagagaagagggtgacattccttccaaaactgaaaggggtgtacacaccctttgagatattgtctttaatatccagaacgaaacaggatgatataactcctaatactgcaggggggtacaccctctctgtgatactgtttctaatatccaggaggggaaagaaaaatattaatcccaatatcacagggggtgtacattccccctttaatattgttcctaatatccaggaagacacaggatgatactatttccagcagcacagggcatgtacacccctttgtgatattgttcctaatatccaggaaaagagaggatgatattactgtcaatattgcagggcgtatacactggttctgtgatattgtttctaatatccgggggtggagaaaatgatattactcccaatattccagcgggtgtacacccgttctatgatattgttcctaatatctgggggagagagaatgatattattgtcaatatcacaggggatgtacagattccctgtgatattgtttctaatattcacagggggagaagggtataatactcccgatatcgcagggggtgtacactccccctgtgaagttgttcctaatatccagggattgagagaatgatattactcccaatatcacaggcggtgtaaaccccctgtgtgatattgttcctaacatccagaggaaaagatgatgatattattttcaatatcacagggggtgtacgcatccctgtgatattgtttctaatatccaggggaggagaggatgatattattgttaatatcgcagggggtgtaccccaccctgtgatactgttcctaatatccggggtggaagaggataatattgctcccaatatcgcaaagggtgtacaaccttcctgagatattggtcctaatatccagggagggagaggatgatattactttcaatatcacagggagtttacacaacccctgcgatattgttcctaatatccagcggaagaagagttaggataatactattttcaaaattgctgggtctgtaccccctccccgtgatattgtttctaatatccaggaggggagaaagtaatatgactcccaatatcttagaagatgtacaccctccccataatattatttcttacatccagggggtagaggatgattttgctttcaatatcacagagggagtaaacctttccggtgatattgtttttaatatttaaaaagagagaagataaaattactcccaatacaaaggggatgtattgtgtactcccccctctgatattcttttttaatatccagatggagagaggatgatattactttcaatattgcatgggatgtataaatcccctgtgttattgttctgaatatacaggtggggagagtatgatattactccaaatatcgcagggggttctttccccctgtgatattgttcctaacattcagggagggagaggatgatattactcttaatattgcagggggtgtacccacgcctatgatattgttcctaatatccagagggggagaggatgatctaactcagaatatgacaaggggtgtacacacagcctgtgatatggttcctaatatacaggggagaaggggataatatttctcccaatatcgcagggggtgtacaaccccctgtgatactgttcctaatatacagaaggggacagcatgatattgttcctaatatcgcaggaggtgtacaacgccctgtgatattgttcctaatatccagggcgggagaggatgatattaccctcaatatcgcagggggtgtgcactttccctgttatattgttcctatgatccgggtggggggaaatgacattagtcccaatatcgcaggatgtgtgcaccgctcccccgtgatattgttcctaatatcaagggggagagaggaggatattactcccaatatcgcaagggatgtacatcctccatgcgatattgttcgtaatattcaggaggagagaggatgatattactcttaatatcgcagaaagtggacacccaccctgtgatgttcttcataatatccagggaagcagacgattatatgactttcaatatcgctgggagtgtacatcccttttgggatattgtttctaatatccaggaagggagaggattatattactctcagtattgcaggcagtgtacaccttttttgtgatattgttcctaatattcagaaagggaaaggatgatattactcccaatattgcaggtggtgtatatccccctctgatattgttccttatatcaaggaagagaaagaataatattactcccaatatcaaagacagtgtagacccctcctgtgatattgtatttaatatccatggggaaagaggatgatgttactcccaatatcgcagggggtttacacccacactgtgatattattcctaaaatccagtggaggagaaaataatattgctcccaatattgcagggtgtatacaggccctcccccgttatattgctcctaatatccagcggtggagaggatattactttcaatttgtgtagggagtgtatacccccctgtgatatttttctaatatcaaggatgggaaaggatgacattactcccaatatcgcaggaggtgtacacgccctgtgatattgttcctaatatctagggaaggagaggatgatattactttcaatattgcaggagctgtacaccctctgtggtattgttcttaatatttaggttgggagaaaatgatatgagtccaaatatcgcagaaggcatacacacttccaataacattgttcttaatatccgggggagagggtgatattactcccaaaatctctggggggtgtacacccccttctgatatttttcctaatatccagggaaggaaacgatgatattactataaatattccaaggagtgtacaccttcctaatatcctaatattgttcctaatatccaggggtgggagaggattatattactcccgatatcgcagtgggtgtacacccctcctgtgatattgtttctaatatccaagctaggagaaaatgatatcactctcaataccacagggggtgtacaccttccgcatcatattgttcctaatattcagagggaaagaagatgaagttactttcaatatcggaggggttgtacacaacccctgtgatattgctgctagtatccaggaagaaaggggattatgttactccccttatagcagggggtatacacctcccctgtaatattgttcctaatatcaaggctgggatatacgtggggggaaggatgatattactcccaatatcgcaggggttatacaaccttctgtgatattgctcctagtaaccagggcagaagaagatgatattactcctaatatcgcaggaggtgtacactcccccattatgttgttcccaatatgcagaaaaggagaggatgacattattgccagtatcgcagggtgtgtacaccacccctgtaatattgttccaaatatttagggggagagaggatgatattactcccaacatcgcagggggtgtacacacatcccctgtaatatagttcttaaaatctaggggaaaaggggatcttatttctctaaatattgcagagggtgtacactccccggtgatattgttcctaatagccgggagggagataattaaattactttcaatatctcagagagtgtacatcgcccttgcgatattgttcctaatatccagagcaaaagagaatgatattactcccaatatcttaggagtgtacatttaacctgtaatattgttcctaatatccagggggaagagaatagtattactgccaatatcgtaggggttgtacaccttttctgtgatattgttgcaaatatttagtagagggaaagaatattactcgcaatatcacagggaatgtatacttcccctgtgatattgttctgatatccagaaaaagagagggtaatattactcccaatattgcagggggtgtacaccccccttgtgatattgatcctaatataaaggaaggaagaggatattactcctcatatagaaggggttgtccaccccccttgtgatattattcctaatattcagggaagcagaggatgatattattttcaatatcacagagggtgtgcagtccacctgtgatattgttcttaatattcggggggagaggatgttattatgcctgatatcgcagtagaggtacacccctcaagtgatactgttcctaataaccaggggtgaagaggatgatattactcccaatatcgcaggtggtgtacacccccccatgatggtttctaatatacagagggggagaggaaaatattactcccaaaatcgctggaggtctacaccccccttgtgatattgttcctaatatccaggaaaggaaacgatgatattactgtgaatattccagggggtgtacacccgctttgtaatattgttcctcatatccagggtgtggagaggattatattactcccagtatcgcagggggtgcacgacgcccctgtgatattgtttttcatatccaggaggggagattattatcaatatggcaaggggtgaacaccccctgtgatattgtacttaatagttaggttggcagaaaatgatattagtctcgatatcgcagggggtgtgcactccgcctggtgatattgcttttaatatcaagggggagaaaatggcattactcccaatatcgcagggggtgtacaccgctcatgtgatattgttcctaatatccaggtggagagaacataatattactcccaatatcgcacaaggtgtacacccctcctgtgatatggttcctaatatccatgggaggagatgatgatattactcccaatatcacaggggatgtacaccacccttgtgatattgttcctaatatccagggaagaaaacgatgatattattgtgaatattacagggagtgtacacactccctgtgatattgtttttgatatacagggtgggagaggatgatattactcccaatatcacataaggtgtacaccccccgtgatattgttctaaatatttcggtggggagaaaatgatattagtctccatatcacagggggtgtgtgctcctcaggtgatattgtttttaatatcaagagggggaggagattatattactttcattatcacagggggtgtacacccctcctgtgatattgttccttatatccaggcgaggggaaaataatattactctcaatatcgcaggaggtgtacacaccccatgtgatattgttcctaatattaagggggaaagaagataatattactttcaatatcacagggtttgtactcctttcttgtgatatagtttttagtatccagggggaaagagcatgatattactcccattgtagcaaggggtgtacacacctcctgtgatattgttcctaatatccagaagtggtgaggatgatattactcccaatatcgcagggggtatacaccccacctatgatattatttctaatatccatgggaaaagagtatgatattacacccaatgtcgcagagggtgtgtatttttcctgtgatattgtttctaatattcaggcggggagaagatgatattactctcaatatagcagaaattgtacatccccgctgtgatattcttcataataatcagggaaaaagaggatgatattactaccaatattgcaggggggttacacttcccctatggtagtgttcctaatatccaggaagaaagaggatgatattaatcccattatccaggaagtgtacacccaccctgtcatgttgttcctaatatccagcagggaagaggatgatattacaccccccccccgtgatattctccttaatatccaggaggggagaggctgatattactggatatatagcaggggtgttcataccttctgtgatattgttcctaatatccagaaaaggagaggatgatattacttccaatatcgcagaaggtgtacacctccctgtgatattgatcctgacattcagaaggggagaggatgatattactcaaaataccgcagggcatgtgcattcccttgtgatattgttcctaatacccagaagggaacaggataatattactttcaatatcgcagggagtgcacacccccctttggtatggttcttaatatccagaaggaaagagggtgctattactttccatattgcaaggggtgtacaccccactgtggtatggttcataatatccaggcagggagagggtgctattactccccacagtgcggggcatgtacaccctgctgcggtacggttcctaatatccagggggagagaggatgctatgactccctatatcgcggggtgtgtacacccctgtgtggtatgttttgtattctccaggaacggagagggtgttgttacccctcatatcgctggaaatgtacactcccctgtggtatggttcgtaatatccaggggattgagggtactgttacccccatactccccatatcgtggggggagtgcacctccctgtggtatggttcgaaatatccagggtaagagagggtgctattattccccattttgcaggaggcgtacacccccctatggtatggttcgtaatatccggggtgaggggatgctatcaaaagaagagagaaagagaccccccatattgttctatattattttatactcagtacctgttttaagaagaaacaaggaagtgaaaccaaaagcaggcagcccggcgccaggcaccagacccaaaaccagacccgaaaccaggcctgggcctgcctgaccttagcctgatagttaaaattcaacccatgacctagcaaccaatgttatccatagattccagacattgtatggaaggacattgtgaaatttcttgttctgtgctgtttcactctgattaccggtgcctgcagcccctgtcacatacccactagattgctcaatcaatcatggccctttcatgtaagatctttagtgttgtgagcccttaaaaaggacagaaattgtgcactcaacaagctcggattttgagacgctagtctttcgatgcttccagctgattaaaagccacttccttcactacctcggtgtctgtggggttttgtccgcgactcctcctgctacactatgactccccatatcaaggggggtgtacacccccctgtggttcgtaatatccagcaggggaaaaggtgctattactccccatattgcagggagtgtacacccccttgtagtatggatcgtaaaatcaaggggggagggaaggtgtaattatccccatatctcagggggtgtacacccctttgtggtaaagtttgtaatatccagggatattacagggatattatccccaaattaatacttttataatttcttatgcctgcctttactgcaatctctgaacataaattgtgaagatttcatggacatttatcacttccccaatcaatacttttataatttcctatgcctgtctttactttaatctcttaatctcatcatctttgtgagctgaggatgtatgtcgcctcaggaccctgtgatgattgcattaactccacaaattgtttataaaacatgtgtatttgaacaatatgaaatctgggcaccctgaaaaagaacaggataagagcgatgttcagcgaacaagggagataagcataaggtctgactgcctgtggggctgggcagaacagagtcacatttttcttattgcagaaaatgagtaggagaaatatcactgggaagggaacgcattcctaggggaggcctatggacggccgctctgggggtgtatcccttatgtggttgaagataagggatgaaatacaccctggtcccctgcagtgccctcaggcttgctaggattagaaattccagcctggcgaattctagtcagaccagttctctgctcttgaaccccgtttcctgttaagatgtttatcaatgacaatgcgtgcacagcaggacatggaacctcaatagtaattccattttctccctggccttgtgaccttgctaggcccttctgcccttgtgatcttttattgccatttgaagcatgtgatctctgtgacccactccctattcgtatccccctccccttttgaagtccctaataaaaacttgctggttttgcagatcaggtggtcatcacagaacctgccgatatgtgatgtcaccccggaggctcagctgtaaaatttctctttcgtactctttcactttatttctcagaccaggtgacacttaaggaaaatagaaaagaacctactttgaaatattgggggctagttcccccaatagacattgttcctaatatccagaaaaaaagaagatgatattactcccaatatcacaggggttgtgaaccccacctgtgatatggttcctaatatccaggaagggagagaatgatattactctccatattgcagggggtgtgcacatccctgtgatattgttcctaatatccaggggaggagagggtgatattactcccaatattgcaagggttgtaaactccaccctgtaatattgctcctaatatttaggatttagggggggagaggataatattactcccaatatcgcaggggatgtatatgccctctttgatattgttcctaatatccagggggggagaggataatattactttccatatcacaaagagtgttcacccccctgtgatattgttcctaatatccaaaaaggaagaggatgatatcaatcccaatatcacaggaagtgtacaccccccccttttatattgtttctaatatccaggggaaatgagggtgatatttctctcaatatagcagaatgggtacactccccctgggatattattcctaatatccaggggaaaaaaagaggttgatattcttcccagtatagcagggaatgaatacaccctttgtgatattgcttctaatatcaaggggaaaagaggatgatatgactcccaatatcacaggggatgtaaacctgtggcgttgttgctaatatcaaggagggaagagtatgatattactcctaatgtcgccgaaggtgcacactttccctgtgatattgttcctaatatccaaaagggaagagaatgatattacccccagtattgcagggtgtacaccacccctgtgatattgctcctaatacccaggaaaaaagagaatgctattacccccaatatctaaggggacgtataccttccctgtgatattgtttctaatatccaagtggggagaggatggttttactctcaatattgcagggagtgtacactccccctgtgatactgtttctaatactcgggctgggagaaatagtattactcccaatatcgcagtgatattgtttccctgtgatattgtttctaatatctagtgggggagataattatattactaccccatacacaggggagggtgtacattcccctgtgatattgtttgtaatatccagggaaggagaggatgttactcccaatatcacaggggttgtacaccccttttttgatattgttcctaatatctggggggcagagaattatattactgtcaatatcacagagtgtgtacaccccctctgttatattactctttatattcagggcggtagaggatgatattactccctatatcacagggggtgttcacccctcctgtgatattgtttataatatctaaggggaaagaggatgatatcactctcaatatcaaaggaaatgtacacctttcctgtgatattgtttttattatataggggggcagaggatgatattaagaacaataccacaggggatgtacacccacgtattgatattgtccctaatatgtatggggaaagaggacagtgtaactcccgatatcgcagagtgtgtacacccccttgtgatattgtttctgatatacacggggagaaaagataatatttcttccaaaattgcagggggtgtacaaccccctgtgatattgtttttaatatccagtgggggagagaatattactcccaatattgcagggcgtgtacacaacccctgtgatattgttcctaatatccagagtaggggaggatgacattactttcaatatcgcaaggggtgtacattcccctgtgatattgctcctaatatccatgaggggagaggatgatattattcctaatatggcaggggctgtacaccttccctgtgatattgtttctaacatccagtgggggagaaaatgatattactccctatatcacagaaggtgtacactttccctgtgatattgttcctaatatccagaaggggagaggataatattactcccaatatcgcaggaagcttacaactcccctgtgatattgtttctaatatccagggaggtagggatgatattactcccaatatcgcaggggatgtacactcccccgtgacattgtttctaataaccagggggtgagaggatgatattacgcttaataccgaagggggtgtacacacccttgtgatattgtgcctaatagccagggggaagaaaattatattaattttaatatttatggggaaaaaggatgatattactcccaatatcacaggggctgtacaccgaccttttgatattgtttttaatatccagaagagaagaggataatattgctcccaatatcagaaaaggtgtaaaccccttctgtgatattggtcctaatatccagggagggagagaataatattactaccaatatcacagaaggtgcccacccccaaggtgatattgctcctaatatccaaagataatagggtgatgttactcccaatatcacaggaggtgttcacaccccttgtgatattgtttctaacgtacagggaagggagaggatgatattattcccaatatcacaggaggtgtatactcctctgtgatattgattttaatattcggggggaaaggatgatattactccctatatcgcagagggtgtacaccctctgtaatattgatcctaatatccagggcgggataggatgatattactcccaatatcgcagaaagtctacacaacccccagtaatattgtttttactatccagggggaagaggatgacattactcccaatttcacagagtgtgtacactcaccatttgatattgtttctaatatctagggggagagaatatattactcccaatatcacaggaattgtacaccacctctgtgacattcttgtgaatatccggggaaaaagagaataatattactcccaatattgcagagcgtgtacacccctccatgatatcgatactaatatttttttaaagaggatgatattactcccattgtcacaggatgtgtacaccccccttgtgaaattgttcataatattctggggggagagcataatattactccccatatcgaaaaaggtgtccaccctccttataatatggttcctaatatccaggatattacttaatccaggatacttgtaataccctaaatatacaattgcttgaacctccacctcccaggttcaagcaattcttctgcctcagcctcccgagtagctgggactacaggggcacaccaccacacccagctaatttttttttcttgtatttttagtagagatggggttttgccatattggccaggctggtctcaaactcctgaccttgtgatctgcccacctcagcctcccaaagtgctgggattataggcgtgacccaccgtgccaagccaggaagaggatgctctatagatttccccaataagagatggctttgcagggccattccaaaatatgtcaaagaaatacatttggggataaaatactttgatttcctttagggaatgttatctattatgtgatgctataccagagtcaggttggagtcggttatcttattgcaacaaagagtctgttccgtcactgttgggatctctattttttcctcttatttcttgagacagggtctcactctgtcacccagtctggagtgcagtggtgcgatcttcattcactgaaacctctgcctcctgtgttcaggtgattctcgtgcctcagccccttaagtaactaggattacaggtgtgcgccaccacacccagctaatttttgtattttcagtagagatggtattttgccctgttggccaggctggtcttgaactcctggcctcgtgtcatctgcccacctcgacctcccaaagtgctgggactgcaaatgtgagctattgtgcccagccaggatctctgttttaatgttagtgctggtcactttgcatgaactccaaagggaagaaatataatgaggtgtgtctgaccccctgccttctcatcgtgacctgaattagtttttcaggtttgcaggggatacccttggacaagaaggggctctattcggttggttggggggattagaattttactttttgtttacaatatttctcctgaaagagttaggggctcacaaggaatttccgcgtgagcaacttatgaggaaagccatctgggaagatatgtgtccttgtgtcactgggatattctcgtttaccccaatgatacggcaatgacgcagggttgtgaaattacagctatgtgtttggggaaaaaagaaagcaggattgtgtgactacgtttccaaacttcacttgcccttagccatagtgagttgggggcctggagattctgttttctttcacaatgatatagatacaattaaatgtatagaaagcaaaaaaataaaaaggtgagtaatgaggaacctctgattcctgagtggccatgtagttacccatggcacagagccacagttactgaaggtaaagtttgctggggaatttagaaatgaatccagctcttggaggagtcagtttactggatgcctaagaaaatgcaaacaaaataagaaaaaagggtaatattcaatcccatagttattgttacctgtcatagctaaagtaaaattaaaacagagtgctggcttcaatcttgatgctacactaagcttagatttcagtgaatgtgagtctcagccactagctcagagccacctcccaaagaccaaatcatgtagggacaatagaaagtacttctgagaattgtggttaccaagaacctagtaactgttggggaggagcaaaacaaagtacagaaaccagagggtacaatctgagtgagactgctatcagcttctggaggagcctttactaaaatgaatgatgagagtaactggatgatgagagtaactaatggatgatgagagtaagcaatgtctttggttttcttttttttttttttttttttttagcagacgtctcactcttgtcgcccaggctggagtgtaatggcatgatctcgcctcactgcaacctccacctcctgggttcaagcaattctcctgtctcagcctcccgagtagctgggactacaggcactcatcaccacacctggctaatttttgtatttttagtattttctggtgagggtccaggtttccggaaacaactcagagacatatgttaagatgttatctttagttttcacagggaaccaaatatgttacgactccaatttccttggctattgttttaagttaccattaccttctcgttgatcaagttgctcatttacttctcaagcctagctagatgcctggaatttcccttgaaggaagtcaagattttcctttatctccatactggctgatggtgatcgagtaagcccctaagaggggtccctgctccatctcgagatgctgctagattctacagtgcctaataaacagctctcgcctggccgacaaagagctgcttgctctctggatagcaattccaaagtgaacagacaacatcctgtttggaagactgccactctgttagaagaagcatcaggaaaacctttcttttgagctatttataactaacagcaattgaccaagtatacttttgtgagtgaaactgacctttctccctgtaagaattctccaaaatttggaaactatttgtgagtatttttacttatggcaatataattattggcacaagctcaatcagattcggttttctttcgtaacaggaaccattggagatactcattactctttgaaggcttacagtggaatgaattcaaatacgacttatttgaggaattgaagttgactttatggagctgataagaatcttcttggagaaaaaaagactgggtatattttcaatatgctttccttttaaggtccctcacctgtggaaagtaaagaatgtcactttctgacaggctcaggaacctcaagttatgtagggatctcaagaagatgggggaattcacccagttcatacaggtgaaattgctgttgcaaagattatgaatatgagagaagtccagcatggctgacttcatctcgtgtctggcctcaggctggctgcccttgctcactcttgggcataggccaagctagccatgggaggaatttagtttatagtttaactttgaagcacggatgataatagtctctccctaaaatgaaccccttccttgctcagggactgaaactacctttgtatgacaaatgaaagcccacaagattaagattatgagaggggcctgaattctgctaaaatgcaggtgtagctgactgataacaagtcattgtcccacagcttgcctttctataatctcttgcttctcaggagtcacatggccagaggtcctgagatttccagtcctgtgacccccacccagagatggacttagtgcatgaggaccattttccacacccctatgatttcatcctcaaacaatcagcagcaaccattccctagccccctgccttccaaattatccataaaaatcctagcctctgagttattagggagattgattaataatcccagtcctaccccttgggttgctctgatttaattaaaccttctctactgcaataccacggactcagtaaattggttttgtctgtgcaatgggcaagaagaacatgttgcatggttatacaggtactacaagcacagtctgatggcaaattattggttttgcttcctgcccttgatgtttctaaacatctagtccaaaattacttgtgaaaggtccagcaaagccaattttaaaagaggctatatggccaatcactattctttctacacattattgcaaataatcaggccacggctgggcacggtggctcatgcctgcaatcccagcactttgggaggctgaggcaggatcacctgaaatcaggagttcaagaccagcctaggcaacatgataaaaccctgtctctactaaaaatacaaaattagccaggcatggtggcatgcacctgtaatcccagctacttgggagactgagggaggagaatcacttgaacctgggaggcagagattgcagtgagctgagatcacaccactgcactccagcctgggcaatagagtgagactttgtctcaaataataataataataatcagaccaagtataatgaaattaaaatttattttgcaaataaattggtcctactacaatttatccttcatagaaatgtggaaactgaagataaaaaaaattaggtttcagaagaaaactatactacacctgttattagattctagccctaaacattgtttttgaggtttttattatttacctgcaatttggtctaaattctgaattatttcctgactacaagtatccaaggaataaatgggttttctttttctttatgatagttttagttggcttctaatgcaacaacaatttttattgtaatcctgtgtgcattctattcctactattcaaattattaatgttatagatctttcattgtagtacttctgaattaaccaaaatcacagtattctgaagatgattctacaaagcctgctgtttctacaaaggctgctgatgatttctacaaagcctgctgtagtgttgctgtggcctctgcttaaaaaagtagaaaacacattgatgcagcatgttcaccccaacctccctgcctaaaggctcagggaccatcttggaagaggaaggcgcgtgagattgtaagagccgaattagggggatggagtgtggagaataaggacacttcatcttggatgctcacctgccaaattgacttctgatgaaagccagctccagaaatgtgcctacagttactactttcacctaaaccctgcccttagtcaaatccttctcttcttctaagcaatcaacttcaattccttgtataacccacagtataaaagggcttttataccattctatcctattgcatgtaagccttgggtctgggaggtaacagtgtgggattccaccatctcatctccctgccacccaaacatgcctgctcttctttaagcaatattaaatgtttgtacttcagaaatttgatttgtcagcctcttcttcagactctcagcttctttggcctttgggagtaaatttgcataggcctgctcaaaacaggatgttctgggggtttgggggtgttgttttgttttgttttttgttttgtttagagacagggtctcactctgtcacccaggttggagtgcagtggtgcaatcatggcacactgcagcctcaaactcctaggctcaagcaatccccccaccttggcctcccaaagttctgggattacaagcataagccaccatgcccagccctggacttttctttaaagacatttacacagtgtaggaattactgtgggtgcactgctcaggtccccttctccaggatgctcattcctacctcatagatgattttcctgcagagatttgacctcagctgaagggcagtcacctggtccaggtggttgctattcacctccttcctgagaacagccaacagccagggacacgctagcacagagatataagagcgaccaaggtgaggccccttctgtgctgcggtgcatgctccagagcctccctgggatcagacttaagagggtctccagccagatctggtcttcgctgctttcctcgagctccccagcgcactcctgcaatgcatcttttttttttttttttttttttttgagacggagtttcactcttgttgcccaggctggaatgcaatggcgcaatctcagctcaccacaacctctgcctcgcgggttcaagtgattctccttcctcagcctcccaagtacctgggattacaggcatgcaccaccacgcccagctaattttgtatttttagtagaaacgggtttctccatgttggtcaggctggtttcgaactcctgacctcagttgatcctcctgcctcagccttccaaagtgctgggattacaggtgtgagccactgtgcctggcccaatgcacctcttgaatcacctcctcatgctttgcttttagagaacatgatccccaacatgtgattccagcaaagattctagaaagccaaccgtgacaatcacttctgggtttagatgacccccccccaccacaagatggcagtgagcacctcatcacagaggtgctgatggtctgcagcaccgcgccaggccagaacgtgccttttacagaagaaaataacccagtagctgactaggatggtgaggagggctggtgagcactgcggtagtgagagggacactagcatcactgagatgcaagtgatggtcatttttcataggtcaaagctcaaagcaggggacagttacagggcagggcttcatagcaccagtgtgatgaaagtatctgggagtggctaaggccagcactatgccatgggaagcaaggtgggcctgaggaggaggcagcagcgtcagcctgcaacaagtgggggctgccctgcagagacctaagagtcatgttatagagcacagtgtctgtaaggccaagaagtgtggacagccaagtgtgtcaattactagacatactcaagaggagcaggaagggcagggcatggtggctcatgcctgtaatcccagctacttgggagactgaggaaggagaatcgcttgaacccgggaggtgaaaattgcaatgagccgagatttcgccactgcactccagcctgtgtgatgggagcgggactccatctcaaaacaaaaaaagaaaaaggaaaaagaaaaaaagaaaaacctaggtatacttctcaagcaaataaaaataatcaaaaccaatatcatgcccgggcacaaatttcatatatataacagatttaaatatatgagggtgattatcctctcatatctccatttttttttgtttttccatttttttctttactaaaaaaagttaatgccaatgacacacaatttttttttttttttttttttttgagatggagtctcacttcttcgccctggctggagtgcaatggcgtgatctcgactcactgcaaagtctgcctcctgggttcaagcaattctcctgcctcagcctcccaagtagctgggaccacaggagtgagccaccacacccagctaatttttgtatttttaatagagacggggtttcaccatattggccaggctggtctcaaactcctgatctcaaataatctgcccgcctcggcctcccaagattctgggattataggcgttgagccactgcgccccgcctatgtatgattttttttttaattttattttcataagtttttggggaacaggtggtattttgttacatgagtaatttctttagttgtgatttgtgagattttggttcacccatcaactgagaagtatacactgaacccaatttgtggtcttttatccctcacccccttcccaccctttcccccggagtccctgaagtccattgtatcattcttatgcctttgcatcttcatagcttagctcttgaacccttactttctgtttgagggagaagacatatcatctacaagtagatactgtgtaaacattccattgcatgactatcccataacttatttattatttgtgtttggttatttgctgctatgtaacaaccccactcccaactaaatggtgtgacaattccatgattctgtggatcaaaaattctgaaaagtcaaacccaaggagttttgtctctgctccatgatgctaaagcctccgcaggggtgaggcgaatggctcagggtgactgaaaagctcagggttggaacagctggggatgaggcctctatgtataagatgattcttcactcacaggtctgaaactatggtggggacagccagaaggctcggctcagctgggacagtcacctgagccctacacatgacctctccaacatggtgatcctgaagcagttgggtttcttacacagcatcacacttttcttttttttttttttttttgagatgaaatattgctctatcacccaggctggagtgcagtggcacgatctcagctcactgcagcctccgcctaccaggttcaagcgattctcctgctccagcctcccaagttgctgggattgcaggcgcctgccaccaagcccagctaatttttgtatttttagtagagacggggtttcaccttgttggccaggctagtcttgacctcttgacctcaggcgatccgcctgcctcggcctcccaaagtgctgggattacaggcatgagccaccgcgcccggccaaagctcacacttcttatgattcagccttagatgtcacatcagttcattttccccacacttattagtgttagaagtcacaagcccacccatactcaggggactggcacacagaccccactctcaatggaaggggtgggacaccaccattcctgctgatgggcatttgggtaacttcctgtttgaagctattaagattgggctgctgtggccgggcgcagtggctcacgcctctaatcccagcactttgggaggccgaggcgggcggatcacgaagtcaggagatcgagaccatcctggctaacacggtgaaaccccgtctttactaaaaataccaaaaaaaaaaaaaattagctgggcatggtagcgggcgcctgtagtcccagctactcgggaggctgaggcaggagaacggcgtgaacccgggaggcggagcttgcagtgagccgagattgtgccactgcactccagcctaggcgacagagcaagactccgtctccaaaaaaaaaaaaaaagattgggctgctgtgactattctagtaggtgtctttggtgagcgcctacacgtgtttctctttttctctttagtatatgcccaggaggggaactgctggctcccagataccgtatgttcagggtcacacacacttccacagggttttccaaagcccttgtaccagcacgcactcccagcacctgtgtgactgctccagctgtcccacagtctcatcagttctattgctgatattttcattttagcttaagttatatttaataggaaaattaccgttgcctctgccccccgttcctgcctgtaggagtttctcgtagctgttgctacaggtggccacaaatctgtcacttaaacccacacaaattgatgtccttatggctttggagtcagaagtgtcaactgaaggtactagcagggctgtactgacctggtggcctcagggagcatctgtgctgcttctccaccttctagaggctgctgcatccctcgctccagccccttcctgacaccactcaccctcctacttctgttatcacatcctcaccttctctgtgttcagggctccctctgtctctctcttgcaagcacacttgggattccattgagggccacccacataacccaggagaatttctccacctcaatatccttaacaactgcagagcccttttgccataaaagttaccattcacgggttccagggattgtgacatgggtagctttaggagtgattattcctgcctgtctcccgctcaccagaacttggactttctctctcaacaggagccccctgtgtgggaatagcctgtctcaacgacgccctctataaggacctgcttcctcaaaggacctcatagtcgggtcctgcccctcagtgtccagtctgccttggctggaggggctgcaggggtgtgttggcgccacctggtggagacagggcatcacagcaggtgggagcccagtagaagcacaaccaaaacatgggtaatgtttaaaattttctggctaagcgctgtggctcacgcctgtaattccagcactttgggaggccgaggtgggtggatcacatgaggacgggagtttgagaccagcctggccaacatggtgaaacatcccctctactaaaaaatacagaaaaattagctggacatgtggcgcgctcctgtaatcccagctactcgagaggctgagacacgagaatcgcttcaaccccggaggggttgccgagatcgcgccactgcactccaggctgggcgatagagcgagactctgtctcaaaaaaaaaaaaagaagaggggaggcgaggggaggggaggggaaaagggggaatttgtttggagctgagacatccatcttctcctgacctcagatatttgcactcctggttatgaagccttcacacttggactgaatacaccaccagctttcccgatttccagcgtgcaaatggcagatcgtgagacttctcagcttccataattacatgagccaatttatatatataaattgggtcctccagaaaaacagaataaattatatatataattatacgcataacttaattaaattatacgtataacttagctatatatataatttattctgtttttctgaagaaccctactgacacaaatgttgagcatcttttcatgtgcttattggcttaataacttgtacatcttctttggggaaatgtctattcaagttctttgcccattttgtaactgaactattaatatttgtctttacattgttgagttgtaaaagttccttatatattctagatactagagccttatcagatatatttctgcaactattttctcctaatatataggttgtgtttttattttctttttctttttttttttattgagacagtctcactctgtcacccaggctggagtgcagtggcatgatcttggctcactgcagactcgacctgccaggctcaagcaattctcccacttcagcctcctgagtagctgaggttataggcacttgccatcgcacccagctaatttttgtattttttagtagagccgaggtttcgccatgttgcctaggttggtcttgaactccctgcctcaaagcgatctgtcagcctcagtctccctaagtgctggaagtacaggtgtgagccacagtgcccggccatctattttcaatagtgttttttgatgtacacaggtttggaattttgataatgttcaattcatccatttttttttttttttttttggttctttctactggaccaccactcttgagccctctaatccaacctccacgcggcagccagagggagctctctaaatgtaattactctttccctgctccacctgctcaaaacagtgtcacatttgtgatttaaaacagtatttctcaaacctaatttgcaaacaaagcaggtggaactcttcttgtatgcacagcatctgatttggttggtctggcatgggtctgggagtgagcacacctaccaagcggctgctggggtaacttgcgttttccactgatgatttcagcaatgtttccggtcccacatgctcctccagaaccttgtactcccccatgaaaaggtggagtccatttccccttcctttatttatttttttgagacgaagtttcactcttgttgcccaggctggagcgcaatggcgtgatctcagctcaccgcaacctccgcctcctgggttcaagcaatgcttctacctcagcctcccgagtagctgggattacaggtatgtgccaccacgcccagctaattttgtatttttagtagagacggggtttctccatgtcggccaggctggtctcaaactcccgacctcaggtgatccgcccgcctcagcctcccaaagtgctgggattacaggcgggagccaccgcgcccggctatttccccttcctttgaacctgatcaggacttgacgatggcatcaacatggtgagagtgaccctgcatggcttatgaggctgggttacacaaggcgatgttgcttctgactggctccctctcaggatacatgcccttggaacccatcctctaagctccttgggagcccaacttagcccatgtggagacaagacagggagagaaacagaggcacccccagccctcagccagcatcaaccgccagacaggagagcaaatgcgccaacaatgattccagctgaagcctcagacagcgtggagcagagatgagggatccctgcagattgcagatgcgtgagcaaaatgcatgctgtcactgttttgaaacaacaatgtctgggggctgtttgttatgcagcaatagacagctgtaacaatgctgttactgctgtattccatgaatgactgcactttgagtagcagggggctagatcactagataagccccatggcttctgtgtatgctatttttctacttttatatccttttcattcactttttttttttttttttttgagacagagtctcactctgttgcccaggtgggagtgcagtggtgcaatcttggcggactgcaacctccacttcccgggttcaagcaattattgtgcctcagcctcctgagtagctgcgactatagatgcacccccatgcctggctagtttccgtatttttagtagagacggggttttgccatgttggccaggctgatctcagactcctgacctcaggtgatccacccaccttggcctcccaaagtgctgggattacaggcgtgaaccactgcacccagcctcattcactttctttacttggctcatttttccttgttgcctcaattctcctctaagatcactttcctgacatttcagcctgggcctgttgccttctctgggtcccctccgcctcctgtgcctcccccatctcagccttgatccctcagattatacttcctctgtccccaccctgaccatcttggctgtccctggatagggatgggtatcttctcccactggtctgggagatctggaaggacaggcctggaaaagacttggtcactgctggaaggagctcagttagtgtggtgctgaggacagtacgggtgaggctggccccttcacccaaactcccactctcttccatagatttcacctctgtggcccaggccataggattagggcaactccccttaaacatcgagtccatcctccaagctgtccttttttttttttttttttttttttttgagacagagtctcgctctgttgcccaggctggagtgcagtggcgcgatctcggctcactgcaagctccacctccagggttcactccattctcctgcctcagcctcccgagtagctgggactacaggagcctgccaccacacccggctaattttttgtatttttagttgagacggggtttcaccgtgttagtcaggatggtctcgatctcctgacctcgtgatccgcccgcctcggcctcccaaagtgctgggattacaggcgtgagccatcgcgcccggcctcatgctgttcttgaatagtgagcacctgttacaagtcgccccaccagcctctcacttgtacccccctcatctctttctccccaagagacagaggaccctggcacttgtgaagcatgacccagaccctggggccatggcatccaacatcctcattccccatgacccctactgtctagatgtagctgccaagagacccccagactccccgggcctctgtctagagtgccaagacagagagagaatgccctgccgcttgcatgctttgtggggtgtccttcccccttccctggctgctaggcgtgacttcaacgttctccccaacccccaaacagcagcactgacaccagctgcagacctggctcaggttagctaatgaggaccaggctggggatggagcctgaacccctaaaccccagtcctgtaccccaccctaatcctggggtctccactggacaaaacgaagcagcttggtttttcgttgttattgtttttgagatagagtatctctctgtctcccaggttggagtgcagtggcgtgatctcagctcactgcagcctccgcctcccgggttcaagtgattcttgtgccgcagcctccccagtagctgggattacaggcgcgtgccaccacacccagctaatttttgtatttttagtagagacagggtttcaccatgttggccaggctggtctgaaactcctgacctcaagtgatttcccagcctcggcctcccaaagtggaagcggcttatttttaaggagaaaactcccgtggaaaggaatcagcacctcctctgtcaacatttcacttctctgaaaagactctcacttccaacagaaagtgctttgtaacacaacaatgaggctgggcgaggtggctcatgcctgtaatcccagcactttgggaagctgaggcgagtggatcacgaggtcagaagttcgagaccagcctgaccaatatggtgaaaccccgtctctactaaaaatacaaaaattagttccgtgtggtggcgtgagcctgtaatcccagctactcaggaggctgaggcaggagaatggcttgaacccaggagatggaggttgcaatgagccgagatcacgccactgcactccagcctgggcaacagagtgagactccgtctcaaaaaaaaaaaaaaaagaatgagaacatatggacacagggaggggaacaatacacacaaacaaaatttagaaacaggtgaaaataattttagtaatatttttactaatactgatatgctcaaaatattattatttcaataagtaatctaaaaattattgagatgtcttatgttcttttcatcatactaagcctttaatatttggtgtgtattttacactcacagcacatctcaatttgcagtccccatgtttcaagcactaaataaccatgtgtgtccggtggctaccatactggacagcgttgatctgaaatcgcatctgtatgcatcaccagcatatttgcagagatccccatctcagcagcacacctgaggctcatctgcgaaagcacctgcaacttctctacaacctcccacatcacctccaaacacatcctcatgtcatctgcaaacacacccatagctcacaggccaatgcctaaatatcattgcaggcaccttcagagaaagcacttactaaaggggtatacttgattccacatctgctttgacctgcaaatctcccttctcctttacatacatttgcatctcatttgtatgtcaatctaaatccactggcagagcctcagatcatcatctcaaagtcaggtggatgtggggctgggcaggcctccaggtgttcctcctcctgcttcctctggggctcttgatcctcctcctcttccttgctgctctcctcctcctcctccaatatggtgaccagttcctcccgcagcgcccccatctccagccccaggctgcacagctgtcccagcagctggacatccactcggcgcaggttcccctgccagtaggaaggggacgtcacagggatgccaccccagagagcaaggggtctctccaggacctgggtgagagcaggtcccaactcatgtcctggccacagcgcctgggcagggtcctcactgtgcccatggaccctaactgccttcctgcttctcagagtgtctcttgatctctaactcttctctttgtctctccatttcattgtccctgacttctctctctctgtctcctccctctcttatctatatctgtccctgtttccctttgtctctgtccccatttattttttgtctttccatgcccctgtctctctgtctttatgtgttgccatttctctgcccctgcctttggctctctttctctcgcttgccctctctctgccctccccaactttctcaaattcagtctgtctctccatctctgttcctgctctccgtctctgcttcccacctctgtccctctcttttgggatctccctgtccccacctctgttcccgtccctcactctatgtctgtctctcggtgtctgtacatgcctctcatgtctctgcttctatctctcagattctgtttttcgatctctggccttctctatttttgttcatttccattcattctcatttcctctctttctctttcccttccaaacccctcactcaccagctcctccctgatccacagcagactatcgcaggcacctccagtgtctgcccctgcagtcctgagggtctgaccagggatttccactggggagacctccctcagggcctgggggggtgggcccagccccggaggcaccagtccagcctgattcagctgcctccacagttccatcgtctctgagctatggctgcaaggagcaggaagtagcaaggtccagggtggcctggtcccctggggagctgtgtgcgtggtggagagtaaagggcagagggagtgggatgggggttcctgggaaaggtatcccaaagtccactcttcagagagaatcagctggccttgtgcttttctttttccttctgaagtctaacctcaactctgctcacagggttcaaacatagcctcttgcagaggtctaactccacccttccctgcctgtctcaggcctgacccctcaggggcgctcagtgtctgtagatgcctggcaccctctgtccttccacctgccccccaccaccacttctccagcctctcctcagcctccatttgacctctggcttgcccatagcttggtccttgcttgtcctcttggcacgggtcatcctagggctttcccaccagtgtgcctttgggggcaggaatggctcccaggggcaccaagacagcaatcccttagctggagtgcctgtgtccaggctgctggcctagggccaagcagccaattctgctgaccctggacttgcctatgggtatattatccctgttgagggtgagggcttctgctgtggaaaagtctgggaagcactgcaggcctctctcggccttggacccttccttcagacccaaggtgcatatatatacatatatataatggtagatcacgaggtcaggagatcaagaccatcctggccacatggtgaaaccccgtctctagtaaaacacaaaaaattagccgggcatgctgccgcgtgcctgtagtcccagctactcgggaggctgaggcaggagaatggtgtgaacccaggaggtggaggttgcagtaagccaagatcacgccactgcattccagcctggcgacagagcaagactccatcttaaaataaacaaatgaacaatatatatatatatgtattttgttttttgagacagagtctcgctctgtcatccaggctggactgcagtggtgcaatcttggctcactgcaacctccgcctcccgggttcaagcgattcccctgcctcagcctcctgaacagctggggttacaggtgcacgccaccacacctggcgaatttttgtatgtttagtggagacggggtttcaccatgttagccaggctggtctcaaacccctgacctcaggtgatctgcccacctcggcctcccaaagtgctgggattacaggcgtgagccaacgcgcccagccccaagtcccttttaccatagaaagtaacatagtcacagtgcccagggattcacaggtatggggagagggttcgttattcagctgccacacccaccttcctaaacctgctgcccttccagtttcctcacgtgcacagccacgcccgtctgcttttagtttctcaatctgttggcttaaccttcaaaacaggcccaggatttgagcacttctcaccattccctctgccccatccccattcatctcttgcctagactgctacagcagcctcttttactggtcccctgcatccacccttgccctctaaggcaagggtccccagtccctgggccaaggaccagtaccagcccctcgcctgctaggaactgggccgcacagcaagagatgagcagcgggtaagtgagcattaccgcctgagctccgcctcctgtcacatcagcagtggcattagattctcataggaggcaaaccctattgtgaactgtgcgtgcgggggatctaggttgcctgctccttatgagaatctaatgcctgatgatctcaggtggaacagtttcatcccaaaaccatccccaccccacccccgacccccagtctatggaaaaattgtcctccacgaaaccagtccctggtaacaaaacggttagggaccgctgctctaaggtacattctccacctggcagaaataatctttacaaaatgtaaatccgattttgacactcccttcttcccactgtgaatagaataaaaccctaccaggcctgcaccgtcagcccctgcccacctctcaacccagtctcctatctctgtctgcaagctggttcccacctcaaggcctctctgctctagaggctacctctccctgcagcgcttttcccctagatctttgaatggctctttccttatcattcacttctacttcaatgtcacctcttcagagaggcctttgctgatggccctacacccagtcacttttttttatctgcttctcatcaaaattgccttgctgattcctttgtttcttattcatcctctcccacatccatcctctcccagcccagaatgttgacttcctgagagagggactgggtctgtcctgctcaccatggtaacctcggcatctagaacagtgcctgccatcacgtggtaggtgctcagtaaatattcttggaactaatgaatgaataattctatccacaagacttcacaatggctcttcatgctgcgatctagctttcaactccaaactggtcttgagatctcacctcagtctctaaccttgacatctaacctcttcacccactctcttacctgaccctaatttttaaaaatgacgtggtcagcttttcagccccctcattccctgtttttaggaggtagtgagtggaagctggaagaataagaaagcttggggagactgcaattgcagtcaggaaagaaaggtactctgccgggaagaacaccccatcttctcctagggaaagattgtggagtcctggggtttgttttgtttttcaattttttgttttaagagacagcgtctcgctctgtcacccaggctggagtgcagtggcgcaatcacagctcactgcaacttcgacctccccggctcaagtgatccccccgcctcagcctcgtgagtagctgggaccacaggcgtgcaccaccacgcccggctaacattttattttttgtggatataaggttgccctatttctttgtggagataaaggctcccctatgttgcccaggctggtctcgaactcctggcttcaagcgatgctttcgcctcggcctccacaaagtgctgggttcacaggtgcgtgagcccgacctgtgtctcgttttgaagctcagggagagggcgctgtgagcaatccctaaaccctttaagagtaaaaagtgcgtgcacctttaagaggacggttagaaaacgcggggcgtggccacaggagaataagttcgcgctgaaccaggagcgtgggataagaccggccccttccggttacgaaaccttagcaagatggcggctccctgggcgtccctgcgcctggtcgcccccatgtggaatgggcgtatcaggggcatccatcgcctgggtgcggcagtggccccagagggcaatcagaagaagaaaaggacaatactccagttcctgaccaactatttctacgatgtggaggctctgagggattacttgctccaaagggagatgtacaaggtgcatgagaaaaatcggtttcgagacaaggagtggatcaggccagataagtatggccatttctctcaggagttctggaatttctgtgaagtgcctgtcgaagctgtggatgccggtgactgtgacatcaactacgagggcctggataacctcctccgcctgaaggagctccagtccttgtcgctgcagcgctgctgccacgtggacgactggtgtctcagccgcctctacccactggccgactcgttgcaggagctctcgctggccggttgcccccgcatctccgaacggggcctcgcctgcctccaccacctccagaacctccgcaggctggacatctcggacctccctgccgtgtccaaccctggcctcactcagatattggtggaggagatgctgcccaattgcgaggttgtgggagtcgactgggctgagggcctgaagtcagggccggaggagcagcctcgggacacagccagccctgtccctgcctagcctttagccctgtccccactcacgtggcttctcagcgggctgcatggaatgtctggtagctcaccacacttctggcttccatttgtcttcactcaacgtcagggtgggggagtggtgctggccaatcacaggagagagcgtgagttcccagtatttattcctggctgcccttggctaaaggtcacagctcctgtcaccctgtcaggcagccctttccatgcccctgttcaggcctggggaggtaaaggctcaggctgttagtagccgcagagagccacactcaccttgtcaggagactcttctcaaactgtccttatgtgagtgcactgccatttcttgcagggaccctgactgacacaggggctactactgacactttacagggatggttctcccccgtgcagggccgctgtgcccactgcaggacatgcagcatccttcgccccactccactcactaaaggccagcgcaccccaggccccatagtattgctggttatggatttattgactttatgttccaaattcagctttttcagttggctgttttttgaaaggggataagctttgtcagtagagggcaccgaacaggcattataggaggaaaggcgcctccttcgtggttcttgttggttgtgcttctgcctctggacgccgcagtgcatgtggcttccccagcacccagctcctgaagcaccaggcggtcagcagctgcccttggcaccctccagccctcagaagttgcgtaggagacacagcgcctccactgaggcacctctctgggaataacgttccccagcaccccaaatggatttccagtcaattcagaagcattttaccagtgaagccctcattattccagttcactgttaaagccagtaattctctatattaaactttccctgttcggtttatactccggagtataaaccgaacaggggtggccaagctgctgtgggccgccgccgtgcagaaccgctggaactcacgcttggggcgacggctacagttggattttgcccctgcaggcaggttcggtgtcgatactggcgttgatagcgctgctgccgtttgacgtggcgaatatgggcttgtttctcggcctgatcgccgtgttgtcgtagttcgcagccacccagga

SEQ ID NO: 735319 - DNA, 188424 bp, Homo sapiens
ctccaaggctgagggatgaggagacctgctgaggacccagggccttatctttccatcccactccataggtcccagtattgactgatgctgtcttcacctcctagcctcacttttaaccttctggcacccgcccaccactgtccagttcactattgaagccctgccgtccagtgctgcagagggaaaggatgttcttctactggcctgcaatatttcagaaactattcaagcctattattggcacaaggggaaaacggcagaagggagccctctcattgctggttatataacagacattcaagcaaatatcccaggggccgcatacagtggtcgagagacagtataccccaatggatccctgctgttccaaaacatcaccctggaggacgcaggatcctacaccctacgaaccataaatgccagttacgactctgaccaagcaactggccagctccacgtacaccgtgagtgattcccccatacctctgggtgctggcggtcagttctgcttcacacacatgagattgtcaggcctgggctgtgcctgcatccccctctgcattttgtcccgtgttgagatttgggcatttagtgcaggacacacacatggtaggtaaacttcaacagatcagaattcctttcctgcatccaggccctgcagacactgatggcgggggcgggggggcctcagcagggggaggtcagtctcagccaagcaccccatgccctccccatgaacctgaccctgagaaagaccctggagaactgggtcagggcctggcctgagggcgtcctgggaacctcacaaaagcccagcctcaggactcctgactccgtgtgaccccgggaagcctgtgtcagggctggggtgtggtctcctgggcagggcttactgggagcaaggatttaccagatgtctgcgggctgtggttcctgaagcttctcatcagtgagggctcagctcccagagtctcatctagacaaggacagagcctaccactttccctgggactcagcctggagagggcagggggacaggattactagggcattggccccctgaatgaggagcttaagagatgcccttgggcagtcagtggcccaggggtaggaacagaggggagaaaatgttcctggcagcttcttgtccaccggggatcatgcccaggggtgctctcccatggaggcaaataacagatgctgttgatgtgaacacctcctctgtgccaagcttcatgtcagatcctgtgaataatttaaagttcattcacagacaaagtggcaagcctcagaccattttccatttacatattgtatggaggggaaactgaggcacagagagatacagacaccggccacggtgggcagatcgcagctggcagagtcacatgagggctgtctgcagctgctgccacgtcctctccttcatccctggtgccttactaggtgtctgtggaccttagaacagccactggttcggatgttttcttcttaggtgtctacagctcggagggggagattctggtctggagagttatgagtaaatacagaattaatcagttttttcttaactaaatcacctgcctcaacaatcagtcagtgctggggaagttcaggcctcctcgctcaggtccacaccccgcatctctggacatgaaatggcttcgtgtgttttctgatgtgtgggtatcattccaacaggaggataaaggggaggactttgctttctctccccattcacaccctgcaccagccagggcccagtgtgagacacatactccgtagttctctcatgaaggagggagggaatgaatgaaggaatgatctataacctcttcagagacagagacctggatacaagatcctaggaggttctgggcccaacgtgagacacacactctgtagttctcttatgaaggagggagggattgaatgtaggaatgatctataacctcttcagagacagagatgtggatacaagatcctaggaggttctggccacacctgttttctgtccctctagagcctaagacccatgtctcattcatctggcccgtttctcctaaatctgcccctgggagctgagtctcatctgaccctggggctgcagggctgtgggaaggttttcaggggagggatcaggcttgcgggtagtcccacacgtttgccttacaccctggagctctacctggttctcactatgaatatcccataataatcccccctatcctttctggggagtagaaaaaaagtaaatatttaaaaatatgccagagcatctgttcttcttagcaagttcagatagttattagttagcaggaataaatcgttattttaccagagcctcacctgctgggggtttatgggagcctaactgactgaggggggtgggaaatatccaactccagccccctctagccatcatgtcccacctaaaggagagaaaaaactgagaggcacttgtgacattcacagcccagggcacagactctatccaggaccacagaacccctccctccccccactcaccaccgcatcactgaacgcctgctcacccaagttcctgttgcccagtacatcatgtcctggctttcaacaaaaactacaagacagactagaggcaaaaaaaaaaaaaaaaaaaatgcagttcgaaagacagaacaagcatcagaaccagatgcagatgtggcagggatgtggcagggatgttgaaattatcagaccaggaatttaaaacaactctggggccaggagcggtggctcatgcctgtaatcccagcatttgggaggccgaggcaggcagatcacctgaggtcaggagttcgataccagcctggccaacatggcaaaaccccgtctctactaaaaatacaaaaaattaggcaggcatggtggtgggtgcctgtaatcctagatactcggaaggctgaggcaggagaattgcttgaacctgtgaagcggaggttgcggtgagcctagattgtgccactgcactccagcctgggcaacagagcgagattccatctctaaaacaaacaaacaaaaaacaatactggctaatatgctaaaggctgcaatggaaagcatagacaatgtgcagaacagacggatgctgtgagcagagagatggacaggctaagaaagaataacaacagctactatatctatctatctatctatctatctatctatctatctatctatctatctatatatatgtatatatatgctagagatcaaactcactgtaacacctggatctcagagtggttgtgaggatgtttattaggagattaaagagattaaagcagagttatacacagggcgagagctcaactgatgctatcaactagtattcttatttttttgatgttgttattggcaataaaatcaggaacaatgcagtaaaaatttggttttatcatgtacgagttctgtgaccttccttgacttactgaggtactgtaagtctcagattctaactctgcagatggcggtgatgcccctctccctcaaggtgatgtgaggatgagatgagctgtaggtaggttggtgcccactgtgcctggcacatggaaggcccctgaaaatagtcaatgaacatcatccccgctcatcagcatggagttgacagtgagggctcgctctctgtgacaatcatggaatggaaaagaagaaacaagaggaagactgggcgcagtggctcatgcctgtaatcccagcactttgggaggccgaggcgggcagatcatctgaggtcaggagttcaagaccagcctggacaacatggcgaaatttcatctctactaaaaatataaaaattagcctggcatggtggcacaaacctgtaatcccagctacttgggaggctgaggcaagagaatcgcttgaacttgggagatggaggttgcagtgagccgagattgcgtcagtgcactccagtctgggtgacagagcaagactccatccaaaaaaaaaagaaaaagaaaaaagcaacagagggaagaggtgtgacatgagaggaagaagggatttaaaggtacaggagcagggcgaggtgcaagcacctgtgggagaatgtaggagttggtacatcccagtgtgtcaagtctgagacacagaaaatggtgcaaccgtggagagcaagggagtcagctatgaggacagcccaacagaccacactcaggctctggagcatttccttcctccctgactatgcccctgccctgcaatgccccttatggtttcccttggaacaaacttgggccttgtcccctttgccttcccctttctgcagaaaacaacgtcccaggccttcctgtgggggccgtcgctggcatcgtgactggggtcctggttggggtggctctggtggccgccctggtgtgttttctgcttctctccaggactggaaggtaccgcagcttttccccagcctcctcccacccctaggctgaccccagtcagggaggagggagaccccgccctgtattcagggccaggctttccgcatcctcccaaggaatccttccctctcattccatggctcctcccttgccagctgctgatcctaggctgcctcttcctttatgaatgtggcacagttaaggttgcacccctgagtgctgtcctagttccctaacacagcaaagccacagctgcctggagggaggaagggagggagggagggagggagataagacgggagtgctcagaacctggtaccttctgctgttcattgaatttacccacccagtgaggagggatttgcaggcttgagatccatggtgggggtcctgggcatggtcacgcagtggggagtggcaaagcctggacaggctgggtagggtcagcaccccatcgtgattgatgtccctgaggtgtgagatgggagaacctggacctcaggacctgctgtcctttatgtctcttgccaaggggtggagagagagaggacaaggccattgccccatttcagcatctccaggcctgaaaggagggtctggccatggcagggatactgagttctgggagaatatgatacatgctccttgcctccccatgcccccagctcccccagtgtcctgcacacacagccggccctgctttccctctggggccttgacccttcctctcaggcaaacgcaggtggtctgattccctccctgagtcctcagtccctttcctgggtccctgggtcaatgttctcctcacccggcatctgcctgggggggtccttcctctctggccaggacagacgtgactgcttaaggcctatcctcagctccccgtcctcggccgctcctaccacgaaactgatggagacaggaggccttcactccagtccttgaaaatggagtcccttccttgtcctttattctgcccctaaacctgtgatttctccctgcaccctcatgaataatcctgacctttcctagggccagcatccagcgtgacctcagggagcagccgcccccagcctccacccctggtgagtgtcccttcagcccaggtgtgggagcccctaggcctgccctacggtgtccactcctgccagtcaccccctgggggcctctgaccctttctttggggctgcaaggaggatgtcaggaaacatgacacaggggaccccgactgtcttgttcagactgatctgtgggctctgggtcgtgggtcacctcctcgacctcagctgctcaggtctcccctgggaagaggctccctctccctgattctctgggagctgaggacccctacactctcctgcaggaggggcccaggctctcctcccaccctgctgctcactcctgtctctgtccccaggccatggtccctctcacagatccaccttctcggtaagcctgttccctccccagcccttttctactggggtcccaacagtgcaggctcagggcagggggaccatcaaccccacagcacagcactgacccacctttccccagaacagtcaggtcaaagtgagtgcctccagccaggatccgggcctctctacagggccaggaccacccacgccatgtgctgacccctccccgggaccctctacacctgaggagaaccctggagtccagcaggtgcagaatggacactgggaccatcagtcagaggcccacattaacaagggtgcggggtgggcccagccaggacaggggtcagggtgttgtgtccacactgggaggctgagctcaggggcagagctggtcaatcctgaggggaaatgagtggaagtggaggcagggaagtaagtcctggccgatcagagacaggaaccttccaggctgggcttccgtgaccctccctccctgtcccctgacatctcctctctcccctgcccaggcccctctacccagccccagaacagccactcccatctatgaggtgagtgtgggccatggatgttctggtcccgcaggctccaggggacccaggatctgcccccaccagcacctggctgagctcagattcaggaaaatgcagtgaaaatgagaacaggtggtggtgagcagaggagggaggggcctgggaacagggaccccctgagcacagccaggttcagccccagagaagccctgggtgggcccagagcctgggagatgccagacactgttctgagaaggctacaggggttgaggcctcttctctgtttttacaggaattgctatactctgatgcaaacatttactgccagatcgaccacaaagcagatgtggtctcttaggttcctctgggagctgctcttgtgggttgatggagcgtccccaaagctcccagccctggggacggggaaggacatggagcctgagccagagaaccagctctgagtcctgaggagacacaggcctggggacagggagggatgggagtccctgctgaatatctggagaccctgacaggttgccctgggctctgggtgggccgggacaaaggcctctcatcaccacaggaagcgggggcttgcaaggaaagtgaatgggcctgtggcccacccggggtcaccaggaaaggatctgaataaagaggacccttcctctcattggctctttttctgctcacgggaacttagcagaaactcacctgaaactccgtgtccattctctcccgggtcacacagggaaaatatctccaccttgtctcaaccacagtctctcttccctgggaggcagaaataggggttgggagtcaggctggggtgggccctacacaggaaagggcaagattcacatgagccctgcccagccagccgagcgctcagctgtcctcacactaccccagggaccaaggccatgcacagccccagcctgggtccctctgtgaatgcatgtggggtctcaggagcacagaagatggggccatctgatgtccacaaaaggtgagcaatgcgggagcaaccatgggtggtataggttgcggctgtggcccctacgcagcctccagtgtcctgacccctgctgccctcttcacccaggccctggaggcccagtctatcactgtcctccacaaatgaacttacctgtccccaaatccaggatcctgtgtgcttatacctggccactaggttctcctctgtcccagtggctactgctcaggacatctttatccctggtggggcacagagaggggctgtcagagcaaccaagattaatacagacgcataattcagtccttgagcactacccaggactctggcccctcattgctcatcagttcccactttaccccctggcatggatctcactgagcaagccaactctttacacaggagcatccaggtcagaggtgcaggactcccccatctaaagctcatgcaggctcccatggcgatgggacaacctgtctgctcctctccctggcccacagccctatctcgcctgcagctcctccacacacctgggacagcagttctcagcccttccctgagggcccctggaagggtgatgatctcatataggttcacttgaaccaggtgccaccttcccacaagtgagctggtgcctgcactaaagcacagagccacagttcccaagagtgttctgccactgccacaggtcccaagagtgttctgccactgccacaggttgttcgtcctgagatgagaggtaagaaaacaacccgcaatgggttgttttatatcgggatttgcatcaggatttagctctaaatgacccctgatcccacctgcacacagcgtcagatgagacaaggtgaggcctctttagttttctgttgaggctgtgacaaattaccacaagcttagtgacatagaaacctgaaccaaagtgcccacatggctgtgttctttctagaggctccagggaagagtgcatttcctctccttttccacctcctagaggcctcctgcaaccttggctgtgtcctctttctccatcttcaaagccagcagcacagcatcttgaaactattctgtgccctgcttccatccccacatctccacctcctcccacctccctctctcacttaaaaggaaggagccttgtggttattttggacgcacctgggataaaccacaacaacctccccatctcatgatccttcctttaatctgtaaagtgtcctttaccacgtgacatgtccacagatctggggatgaggatgtacacatctttgagaggcccttgttctgtccatcactcctctcaaggccatcttctcatcatcgttcactacaaactacacatgggcacctggatgggttcatcatgactgtggcgtcagttcctgcattaacatccccagcaccctccagatcctgagagagggagacggagggctctccatgcccctagtacctctccaccttcttcttggtgacatgcttagttgctaagaataacagaaagcggaggtgactgaaagatcacaactcaccggcccttcaatagttcgtggacatcagcaccacggacagtgactcagtgaggctaatttccaggtggcagcagggagcatgcagataggagggaactgcaggaaaagctgcccattctattctatatgagaaagagtgtaagaaagaggaagctattacagggataatgctattcttctctaatccataaattgcgaaacctttgcatgtctggatatcatggtttttagcacatctgctgccactccctgcagggctgattgctgcatccaggatgtggtctcttggggggctcacagcctgctttggcctcatggtgagtctccctgcccctgacactcaggccactgtctctgcctacaacatggtgggaaccttccatgattaacgtctgattctctgtgcctgacctttgaagcacatccatcactcagcctggagcatccgctgagctcagcatcctgctcctccatccccagctgagcccttgaggagatgcttgagaggatctcctgggctcctctgtgagctcctccaggctgagccttgtgcttggtgtcagaggcctttgccatctgcttgttctttccataggcaaataatcctcctcagggacaagtggggcctgaagatctgtctgaatatctatctatctatctatctatctatctatctatctatctatctatcatctatctatatgtatgtatatatgagaatgctttattaggcaaaactgcatactatgaacatgctttaaaatgcaacaggatgagatgtgaagacataaagaacaagtgtgtagtgacacatggctatcagaacacactgaagaatccacaccgcggccgagagcagtggctcacgcctgtagtcccagcacttttggaggctgaggcaggcagatcacttgaggacaggtgttcgagaccagcctgaccaacatggtgaaaccccatctctactaaaaatacaaaaaatttagccgggcctggtggctcatgcctgtagtcctggctgttcgggaggctgaggcaggagaattgcctgaacctgggagacacaagttgcagtgagctgagatcgcaccactgcactccagcctgggagatagagtgaggctccatctaaaaacaaaacaaaacaaaaagaatccacactgcttccccgcttcactttacccagaaaaggaatgttctaggccacttcctcttcagcacacatccccagggaactaaaataggttcacagtcacccccatcttcctcattcccatcacctcttacccacagaggcatctctggtcctacagatccagccctgccttcaagaggcacaggtccaacccatccagtgtccctgctagtcacacacagcactcagggtacaatggagggcttctgtgctttggatgggaacaaaccccacctcacattcccacacctgagaagccaccagggtcctctctgtcctgtcctcacactcaatgtctgtcctgggtcacccttgtcatctctcctggaaataggcatggctcctgacaggtaggattgaggctttgtcttttcaggagtccctcccactctgagcacatgaaactgctcagctccatgcaaccctctctcaccaggggccttgttctctgggtccctgaatacctgggtccatgccatgtacattttaagaaaaatgacagtgactctcaccctgacatcctcacccaaggcacgtgtctgacaagaatcaccaggtgagatacctgtggctccacacacctgaggcttcactgcgcaggggtgtcctcatccctctcctcccacccctagggacagtaagcaccacaggctgccttggaccaccagctccccctcccagacacagcctcagatctatactgacatgctacatggagaggctctgatgaacagcaggtattaggaaatcccaccgaaccaggtgccacttgcggccccactcctcctcatatctgtgactgggacagacacacataacacacctctgttcaccgcccagcccccaaggtcaatcacagtctgcttctcccctagatccactgctccccatgtcttccgtcctcagctgcatcctgggtggcctccttgctgttcttgtaccccagaggcaggttccaacctttgtgatgttgcctgcaatgcccaaactttcccttccccttccccttcccttttcccctcccccttcccctccccttcccctccccacccctatcccttcgtcttcccttgtcttcccttcccttccctataaagccaaacatacccatccacctaccttgtggtcaaagtcatcagcctcctgctccactcagtgttctctgaccctgcatatggaggtggtggcccctcctagaacacccaccactcactgtcagccttgcgtggtaatcacagattttgcaggggttacctgtgttcaggtgtgtcacctgtggaaccagaactcttggaaggactggcagagggagctgcttaggatatctcagggctcctggcatctggtctaccacagggctattaacaacagcacttagggacaaggtggaggatggacggttaagagggtaaatatggatgatgtgtgggcaaagaataggacacaggaacacatgcagtactcaaataattatgccaagaaaggtgaggacatggagatggacattcccatatacttctgatgggactgcagtttagtccctacagcaacattgacctcatcatgtttaacgcgcacacgctctgaccactatcctacttctgaaggcctccctgtgctgtgagctctgagaaggccaagcttgcctgttctgtctctgctaaagccagagaccagccaatagcccagcacagggtacttcataaatacatgttgaaggaatgagctccaggaacagtactccacatggtagagatgtgtgtatgaggatgttcactgcagaaggtcatgtcaatgtgacaagtgacgagcagcctcaaatccagcaacaggggtgtgggtaaaagatcatagtgtagccatgcaatggaaccaatgaaaaaaccacaattagagcaaatccacatgtattaataaaggaggtgccctccatacatgctgcacctaacagaatgttgccaaataagaatgaaaaatgatgatatttgggctgtaaaaactagaagtcagctaaataagaatgcatcgaaagtatttgtgaatgcttacaattttataatgccttggcatccgttttggatggaagttggactttctcataccagaagcagggctcagtcacctttgaaatagtttccagttctccacctccttccagttcctcagtgtgattgatcagatatctgatttatacaactgcctcctggtgacctcctccctatgggacttccggatacagcccgtatgactgccccactgaccccacaccctgcctgctgcagtgaccacctctaattacctggatctcatgtctgcttgcattaaatccaccaattaaaactccctgaggacaatctgtttgaataatattctgtaccctaataaaggccttgacccatgggttccccctctgtcctccccatactgcccctgacctctgtgtgtgtgtgtgggtgtgggtgtatgtgtgtgtgtgtgtgtgtgtcctccagacagggcctgtatcccccaggacctgtaagtaataaatctttattttcatcttatgtctctcgcaatcattggcaagagctctgcatcttaaagatcgcaaatttaagaaattggtgtagtcggcacaatagagtacctcttctgtttagcacaagatatctcggagctgctgaggcttttaacatcctcgccggtgtggctgcctcactggtgaggccgttctgttcagtgcaattcagttgctccactgtgtgctgctgtgttgctgctgtagagtgctgccatgttgttctccccaaattgttaccgagtaggaacctgtaatgtgctcccaaggtggtctaccccatgagaagggggattctccatctagggcaagggctaggtgtgtttctggaatcctaatagggaaggcatccacagagggtgaactccactcctccttagagtgaggagtgacatttcccatttattttccccatggaggtgccatgtattgactttttctttcactgtcccaaggttgagccaaggtgagctatggagaccagggcaagataccatttctgttagcaaagcaaatgggtgacaacgtgtggagaagctgtggttctcctgatggatatagcagagtgccatttagtaaaatcttgtcaggaggctgcccctggttagaccggcagtgtctgtagtcactaaggtggatgcgaattttaggccctgggccatggataatccctgcagacacagccgtggcttcatgtgatggggcaatcccgggctagtggctcccttgtttctgcatttcttgctgtggttgcacaatcaacacctcaggggttgattgggtcaccttggaaagagaaacagctgcctaggaggctggtgcacatggaggccaccctcaattttattctgctaacaagttgtaagattaaaacaacagggggctttgggtaccatcaggaacttgtcaagtaaacatccaaagacagaaagaagaaaaagaaaaagacattaaccgtctagaaatacaagccattttaaagattttgcttaaaagatgcgcttgggctgggagcggtggctcacacctgtaatcccagcactttgggaggccaaggtgggtggatcgactgaggtcaggagttcaagaccagcctgaccaacatggtgaaacctcgcctctactaaaaatacaaaaaattagcagggcatggtggcaggtgcctgtaatcccagctacttgggtggagaatcgcttgaacccgggaggcagagacggcagtgagccaagatcgcaccactgtactccagtctgggcgacagagtgagacttcatctcaaaaaaaaaaaaaaaaaaaaaaaaaagacgggcttgtttcgtcgttgtggagtcatcccagagagaggctactccctagagtcactgaccacctttcctcctccatcttttcctcttatcattctagagacagaaaacaagaatctcagctttaggtggctaacctcaccccccaagaaaagaaactaccactttgattgactacaaatccaagaaaaataaaagagaaactttaaaaagtactgagcaaaccacaggtctagcaaacataatgctagccctaggttacttattcatttacaacaaacccctagatataggaggaaaaaataaaaggtaattaaatatatacacatacaatattttaatataaatatataataaatagttaaattatgtatgtataatatgtaactaaatcaaagtaaaatttcatactttgattctattggaaattcaaaattcatttattaacttatatattaaggaatttatgtaaaaaaagatttttaaaagggcaccaatttgcttttgtgtctctacaacataggatctaatttaactttacatttgctaaatacactaattgacaaatattcatggatttaatcaatactggggctcaaattgtagccacacgtgggaatcccataaatttaaacactctgtccctattatcttgagaagaaaactaaatataaaattgaaaaaaacaggtatgtctcaatttacctgtaactttgcctaaatttcccggagtcatatacccattgctgtaaaacattctctattggacataggtgctctgagacaataaataaaatagaagtgtttttggtacttagacattggcttgacaaaatgggatcccatgaaacctcagttaagatagtgaatacggcccaatgtgagttgaaatggggcctttaaggattaaaacttattacatgaaacctagtaagtaatggggtgattatccatactgcttctccatttcatagcccaattttgacagttgtcaaatctggaaaaaacaaacaaacaaacaaaaaaacccctgggaatctgttgcctcacagagacacaaagtagacatcaaaattgtatatctcagttccagttccaaaatggtggcatagaagcaagctggctttactccttcacacagaaaaccaaaaacaaatatacagcaccaaaattattaccagatatattccagaactcaaatatgaaaatgaaacagttttcagagccacagagaagtgaaaaaaactcccgacagatgacaaaagaatcagatttccccatctgtaatgtccctccctgccccattctgcctggtaccaggtgtgtggaaaattttaccccaactcatggtttctacactgggaaatgtaagatcaatgcgggcaaccagtttctgcacaatcctgggttccctgtccctgccttaacccacaagaagcattgtgagtgcccgaagggagaaatttccctgaggacagtcaaagagtggggaggcaggactaccatctccttccctggaaactctgctgtgtaactcagccaagggagacatgaaatcagactggtgtttcagcagctccatgttgtagtaggtttgtttcacaggtatcctgggcatggacatctagccagctttcccacactgccaggatatcccctttgggacctccctcagttaggaagggcacactctgatcatttactagggccaaggtaaaccctaaaggtaacttagagatgaaaaggaggtagtgacctagcagtaaagaactctaagaaaatctatccaataaaaatcaaaacaagccagacaaagactaaaataaataatgaatccttcaatgtaaagacctggacttacatccacaagaaacagtaagcaggtaaccatgatctccccacatggacaaagtgaggaacaagtgactgatcctgatgagatggtgatgtgtgagctctctaatcaagaattcaaaactgcagttttaaggaaactcaatgatcttcaagaaaacatggaaaagcagttcagaaatttatcagagaaatttaacgaagggattgaaataatttaaagaaaacaaacaggaatcttggaattgagaaatatatttgctgaacaggaaaatttattagagtctctcaacagcagaatggatcagaggaaagaatcaacccaaataagactcccccaaggcataaaataatcgaattctcaaaagtcaagggcaaagagaagattttaaaacagaaagagaaaagaagcaaatggcataaagaagctccaattctgtggcaacagattttcagtggaaatcatacagaccaggagggagtgacatgacattctcaaaatgctgaaaaaatattgacatttgagaatactttatccagtgaagttatccttcaatataaaggagagagaaagtttcctagacaaacaaaagctgagataattcacaccatcagactagtcttcctgtaaatactaaagggtaaatactaaatacttcaatgtgaaagtaaaaaaaaaaacactaacatgcaaaacaaccacaacaacaataacaacatttgaaggtataaaatccactggtgaaattaagtacgtagacaaacccagaatactcaaatagtaattgtggaaagtaatccaatcataactctagcatgagtctcaaaatataaatctatcaaaaacaataatacattttaggaggccaaggttggcagattccttgaggtcaagagttcaagaccagcctggtcaaaatggtgaaaccccatctctaccaaaaaatacaaaaatttgcagggtatggtagcacatgcctgtcgtttcagctatttgggaggctgaggcaggagaattgcttgaacccaggaggtggaggttgcagtgagctgagattgcactactgcactccagcctgggtgacagagggagactctgtcttaaaaaaaaatagctacctgtttggagaaaggtaatataaaatatgtaaatagagacaaagtcaaaatttgcaaaggatgaaattaaagagtagagtttttttggggggttttctgtttctattattttatttgtgatctaagataagttgttaccttttcttctcttgaagatactttgttatatctatgtttttggaagtcttatggtaactgcaacgcaaaaaatctatgatagatccactgaaaataaaaaacaatgacttaaaacatactaccagagacaatcaaccacaaggaagacagtaaaaaatgaagaaaggaagaggggagttacaaaacaaccagaaaacaggcaacaaagtggcagtagtaagttcttacttaaaaatattgaacactgaatataaatggactctattctccaattaaaaggcatagagtggctgaatgctgcctatatgctgcctacaagaaaccacttcatgtaaaaagatacaaatagactgaaagtgaagggggtggaaaaagatatttcatgcaagtggaaaccaaaagagagcaggagtagctatactgatatgagataaactacaaatcaaagactataaaaagagacaaagaaagtcactatgtaatgataaagcgctcagttcagcaagaggagatgccaattataaatatctatgcatccaacacttgagctcccaagtctcccaagtatttaaagcaaacaatagtggatctaaaaggagagatagactgaatacaatattaattaggggactttaacaccctgctctcagcaatggccagatctttcagacagaaaatcaacaaggaaacttcaaagttaaactacacactagatcaaataggcctaactggcatttacgggacatttcactaactatctaactgttacagaattcacattattttcatcagcacatagaacattcttcagaacagaccacatcttaagtcccaaaaccagtcagaataaattcaaaaaagtttatatcacatcaagcatttgttctgaccacaatggaataaaactacaataaatgaataactttctggacacatacaacctaccaagatggaagcatgaaaaggcagaaaaacccaacaaaccaacatgaaactgtaacaaaaggaaaacccaggaccgaatgacttcactgctgaattctaccaaacatttaataagaactaaaaccaattctactcaaaatgctttaaaaaattgaagaggatggaacactttcaaactcattctacaaggtcagcattatcctgataccaaaaccagacaaggacaggacaaaaacaaacaaacaaacaaacaaacaaacaaacaaaaaaacactacaggattgcttgaggccaggagtttgagatcagcctgggcaacatagtcagaaccaatctcttaaaaaaaaaaaaaaagaaaaaaattagccaggcatggtggcatgtgcctttagtcctagctactcgggaggctgaggtgagaggaccaattgagcccaggaggttgaggccgcagtgagccatgtttgtgtcactgtactccagcctggggaacagagcaagatgctctctcaaaaacaaaaagcaagctgggtgtggtggctcctgcctgtaatcacagcactttggaaggctgaggtgggagaactgcttaagcccaggagttcaagaccagtctggacaacatagggggactccatctctcaaaaacaaccaaccaaaacaaagccaaaaaagaacataggccaacatcactaacaaacatagatgtaaaagtcctcaataaaatattaacaaaccatgtttagaaacacatcaaaagagatcattcactatgattaagtgagattcatcccagggatgccagtatggctcaacatatgcaaatcaataaatgtgatccatcacattaaagagaaccaagaacaaaaaccatataatcactccagcaagtgcagaaaaggcatttaataaaagaatgggttgagggagtggagcccatagtcagagcagcagtggtctgggattttggaagtagaaagaagggcagcaccactggccaggaccaccagggaacacccccataggccctgggtgttgtgctccagggagggttccctctggagttattaatcttggtgtccactttgcccagctgcccctcacagggtcagggaggatgaagggaaagcttccttctaatgaaagttcagggactcacagttcctagagcctgtagggagaggaagatcttcgaggaagagcacctgggcattggggcgtttgagaggaagatctatgccaggtccaagtggacaacctgtggactctctctccagggacatacgggtatctgggaatctcctgtagcttaaagaggtaaagacctctccctttagcctgaggactggaggatgctggttcaggtgaatgagtcctgcaggggctggtacaggcctggagggtggtggtgtccagggccttgggttcacccttagcatgattcaggccgggcggtgtttcacatgagcaagagggcctgggttcattgcttcaggacaatggtgaaatctcatggtggaagaaatcttgtccttgccagtgcccagctttcatttggtcttggcccagagtgtcctccctagagaagactcttgtcccttcttcacactgcccttcagggatatgccagccttatgggataagatggggtggagactgtagatgtgggtgggaatctctccacagagtgctccttctctcagcggttgcaccttgtctcagggcttcagcttgaaatctgggatctccaagcccttccctccccagtcctggccaggaccacatgggcagatgcattgtgtgaagtgcatttcatttggggtgtcctctctgcatggcaccctcccgttgattctctttgcgcatgtcagagtgcaggcaccatccacacctcctgctggaggagggacggagctgttgactcctgagagctgatcatgtgttcccaccctcacacacaatcatggtccatcctctgagggacatgtgttgccaccactgtggagatggtgcaactgacagtaacaaacagtaaaatctggtactgaatgggaccttaagccaacaatgacaatgtcattccaaggtgtttcatttttattgattcaatgcaagtcacctgatttcattgactattcacaatagctcgataaagtaaatgcatcatcaccaccactttaaagaggaaaaaggtgcttgggcagtttgtgactactgtggtggctgctgcattgctctctggtaaagccaagtaggtggtgggtgcggcctctgggctgggatgatccaccctcctggtggtggcaggggagccaagctggagccatggcctgtgcagtggtagcagctgaactgaccgctgctgcaggatttgcaagctgttacattttgcgaagccatgaagcacataaaacctcaagtagaacaagtgtttcaaagtctaccaaaatctgccttcagagattattactacagaggtggatatgaacccaaaatgacaaaacgggaagcagcattaatactagataatgaatgaacactagtaatagtagggtaagccctactgccaataaagaaaaaaataagagatgctcattaacatgttatgctcttaaatcacgcagacaaaagagggtctccttatatagtagccacaatcaatgaagctaaagatttactgcaagatcaagctaaaaacagtaggtgtataatgaatttttaacttcatattagtttatgtatatgaatatcaagtttttataataaaatgcctccaaacaaagaatatttgatttagggtttaataacttctaagaggggactcagatgtttcctgtttcacagtcagtctgagagggtcatttttcctggagctgacctgggtggaggcctcacactgatactccccagcatcctctctcctgatggggtttatgctgagcatacagtggccctgggacagctccattctctccatgagtcacagacgctggtcatggaagatccactggataaggttccagagtcatctgtggggcaggtcaggatcacaacatccttttcttctgtgactctggtgttgctgactcagatggggtcggagccactgaccctgtggacaatcagtggaggtgctcaactgaaagtgggctgagggcacgtcttctcctccatccctgggtccttaaggtaactgtggaccccagaccaactgacacaggagctagaaagaaattatttaggaagttagtgagggtaagagcgtccttggcaaggtttcccctttaacaaaaagcagcccaagataattccttttctaacaaagagcagcctgaaaaattgagctacagatgtagatgagcaagatggaagcttgcacaggtgaattccagtaggtgtgccaatagaaaagggctgcctggaagccaggtatgttcaacatggagactccatcctcccttttctccattaccacatgtacagtaaaaaaccaggcaacatggcaccggccaggtagacaatccatctgcatgacaaaagatcagagtggggcagccagcaaatggcacagctggtctaaacaatctttcaccccctgtataaatcagacactgcctcctgaagctcatctataaaaccttctgcatttcactatggaagtggcaacccattttccccaggacccctctctctgtgcagagagctcttctctttctttcccctatgaaacttccactcttaacttcactctgggtgcctgcatcctagttttccatggccatgggacaatgaacctcgagtattaccccagatgaatgatgctgtttcacaatcactggttcagctcccttcttcttagggtttcacagctcggtggggagaataccacgcctcagtggtctggggagtgaggaacaaatgaagaattaatcagattttacttagaacgctatcacctgcctcaaccatcagatccatgttgggaatgtccaggcctcctctcttagatctatacccacttcactggacctgaaatcctgtgtttcccgatgtgttggtgtcactcctatgagaggataaaggagagaactttgctttctctccccactcacaccctgcacaagacagggcccaatatgagacacacactcgctcagtagttctctcatgaaggagggagggagtgacctcgagtgattctgccatctgtagtctgtgtaccctggccagtggctgtatcttcatatgcctcagtttcccctcagtaaaataggacacacaatgagaactaaaaataaaattctaattccccagtgaactgaaaggatggcctcttggccaagcggatcccagagttcctgatcatgacaggatgggaggttacacctcattacagcccctccctttggaagtttagaggtgacaactgactagcattaacgctaaaatcgagatcatgagactgacagaacagactctctgtggccataagataccaaattataaactcaacctaaggtcatgcaggcaagggctaagccacactttcctacatttaaagaataagctatgttctaacacagaattttctttctctctagcggctaaagtaacactagccttcgagataagcaatattgaaatgatcgcggctcatccaccaacactggctaactgacccctgttccaacagccacaactacacttcaattggacaggagactgatttcagtaactttctcctaataagagaccactgagcatggcctggttctgctggtatacagacacggtgcactgagtaccataatgcttgtttcatcttttgatgtataagacctaatttaatacatttaaatctgaattctccaccccaaagtgaacatggggtgcatgtagcatgcatgtttgttgatcacgcatgtgcgtgtacttcctttgtgagtatccatagctccacctataacctgttgaatatgtatacctggccaactcattcagcataaatctatcttccacattcccctcccttgaagtgcctgctattggtctctgctggaggctgcatcttctaccctggggaatggccagcctgcaggctgtaaccctgtgtaagaaataacctggttgggtgcagtggctcacacctgtaatcccagtggtttgggaggttgaagtggtagaatagtttgagctcaggagccagagactagcctgggcagcatagcaagatcctgtctcttaaaaaaattttagggaggagagtgaggatcagaaaaaatacctattggctattatgcttagtacttggatcatgaaataatctgtataccaaacccctgattacatatataacaaacctgcatgcgtatctttgaacctaagataaaagtttgttttaaaaactatctgggtgcagtggtgcatgcctatagttccagctactcgagactgaggtgtgaggagtgcttgagctcgggggattgaggctgcagtgaattatggtcccacctgtgagtagccacttcactcaaacctgggagacagagcaagaaccggtctctaaaaaaaaataaaaatagaaaaataaaatgaaaaatatatgaaataaagtctcctttccaaacgtacagatctccgatttttctgccaacaatgataaatggtcagtggcttgccatgttgtctgtgaattacttttaaaatattcacgatcacctgacctaaaggttggtaccaaggaaccgcctgaatacaccgtctctgattatttgcctccaacagagtgttccctgggcctgatctctggtggacaatgagctgctgggaacatcctctcttctctattcctcccctggggatgctgaccttcccttggagtctcctaagttccccagggcagtcggctaatgtcctagggagcttacctgtcttctccataccaagtctcatgtgaaggacgaggctttgcccttgcccagatgaggctctgggggctgagccctggctggctaccagctgcaagagccatggcccttggacagctggtaaatccttgttcccagtcagccctgcccaagatgcctcaacccagccccggcacaggcttcccagggtcacatggagtcaggatcctgggacaggggactggacaggggtttccagggctgagtttctgaacaggggcttcccaggggtcccctcactccaggatctgacatggtcctacaaggaacgtccatggggaggggacccaggagggggaactgacactgacctccccttactgagcctccccccaaccccatcagactgtccttcctctgtagcaagtgcctgcagggtctggatgcaggaaagaaattctgatctgtggaagtttgtctcccctgtgtgtgtcttgcactaaatgtccaaacccccaaatgggatgtaatgtagagggggacacaggcacagcccaggcctgaaaatcctgtgtgtgtgaagcagaactgacccccaacacccagagctcatgagacatcactgtgtacgtgaaactggccagttacttcttcattcacaagatctgtttttatgacttgtagggtgtaggatcctgtgtcattgttggtgacattctgtatcagcagacatgtattggggtatattgtctctcagcctctgtggcaggtcctggggtaattacttgagttcctagtacatatcctgtaattcccctttgtaccagttgtagccaagcctaaggcagattgtgggtgagtggaagaatctccttgccttctgcagcttcaacagtgacttgggcagtggtaggcaagttccagaaagttaaaagtgaggctaggagtggggagagagcatcagttaatactgggccctatgcattgaggtggaaagatggggccctaggtcctggacaggtctcttcatccctcagccttggagtgtgtgtgtgtgtgtgtgtgtgtgtgtgtgtgtgtgtgtgcgcgcgcgcgcgtgcgtgcgtgtcctactgggccaaggtcagcagcatgacctcccttccttcagtgcctctgaccttggcatttccctgtttggagtccttttccccaggggtctgcctggctccctccctactgccttcaggtcctgctcacattagggcatccttgggagaccccttccctgacacctctagagaccctgggtcttccctttctgacctttcgctgctgtgttccctccagggctcttgtcaatacttgacctcacattctagatacccttgcatgtctgtcttcctccctatgagagcatgagctctgtgagaacagggacttgtgtgatcttggttgcaccccagtgcctgggacaggctgcggactcctgtggatgagctcatgagtgttcccagggcccttcacaacgtgggatttattttccaatggctgaggttgttggctaagagctctgttggagttcaatcaggctggtgggaaaaatattagagatagttatagagatagacacaaatcttcttggaagaccaaaaagtttgcataactttggtaatagatctgactgaaggtggtccctttacctttagttaaacaaattaaagtagtaacaaaggaaggcagagtagtttgtctagccagcttgtttactcatgtgatcttaagactaaccattgatgtgccacaggtgcttaattgctttctacttgggaagtccacaatgtcaattaccctctaacggtgttgactcaagcctttgttaattaatcttactgaataaatatgagtctcactagctgatcaaggccatggtcacaactgtttataggactcagcagggagtctgtaagcggccctgacagactcagctggactggcaaagcaaaatatgtgtgtgtcagtgtacactattcacccgtcccccacagctggtgcccctatatgaggagtgctgccacagagctctgtttagtgtcccttgttttttttcttgagtattaccccaacttaaattgtgattattgtcatctgttttcaacattaactgctcagtgatgattcacttggaaaacattaacaatcgagattgtttcttcactaacaacctcagattatttagattttcctgttgtaatcccttcttcctgtttagtgtccaacagaagccctctgtccctctcaggtccccgttctctccaagaaaccccagccagtctctgtgctccctcctcccatccactcccagggagccctcccctcacctgtgagcagaagcgcctgccagggatgtgcactctgtgaggaggggctgagggaggccccatgggctctgctgtctgctttgtcctcctctgtggagaggagcttgggcttcagaaaataaggaggccagaaagtaaggaacaggctgagaaataatggggatgtgtcgaaaggtcacagatgccaacatctttgtcctatgcaatattatccataaaattacaggtttgagatatgcttaaattttcttctaacatgcattaaaataaacatataacttttaatagttatattaaattgtatttaatataaattaaatgctcttgtcagagctactgtgactgtcagctctgctgtccttcctctctctgtgctaagcctcctcccagggcagaagcacttcccagggccaggggtgggggcggggaaaggtaagtggcaatgaggatctgcacaggtagcctttccgcctcctcccctctcagtcctgcctccttgtcttcttttcctctttttctccaatctacatttcagttccttagaccacgctgtgagaagcaaggcttattgggacccccatcccttaacaggatgacctgtgctccccataagtgacctctgctgtgtctagggattggctctgtcagcacctcacagagagtccctggggcccccaaactcagtgttattttctctatgacacagaaacccctctgggtatgcaaggttttcctcatgttttctaatgtctgggaaggttggatttactcccagcagggaggtcacagagatgtccagggagtggggtcctagaaatggacaaatctagagctaaagcccaggtctacgattttcagttgtttttttctgcagtgctatgtgaccctaatttcctaggagtaactaaaatgcaaacctcagacatttgtagacattttatgatttttctctacagcttgtaccactgttattattatttgctttatgctttttcctaaataaatttactttacaaaacatccttgtcctagtagggtgcaggggctcacgtctgtgatctcagctgcttgagaggttgaggtgggtggattgcttgaggacgggaatttgagacaaaacatctttgtcctatgcaatattatccataaaattacaggtttgagatatgcttaaattttcttctaacatgtattaaaataaacatataacttttaatcatcatattaaattgtatttaatataaatttatatacaatacatttttatataataaattatatatataaatgtatatataatagtttttcttttttgagatggagtctggctctgtctcccaggctggagtgcagtggcacgatctcagctcactgcagcctccgccttctgggttcaaacgattctcctacctcagcctcccgagtagctgggattacaggcgcctgccgccacgcccagctaatttttgtacttttttagtagagatggggtttcgccatgttggccaggctggtctcaaacacctgacttcaggtgatatgccgcctcggcctcccaaagtgctgggattacaggcatgagccaccatgcctggcctatatattttatataattatataaagttttctataataaattttatataataatatataaaatggatatttatttaagataaagttattagttttatatatttacatatatttaggaataaatgtgttactgtgggagcccagtgcccaggcaggtagtcagtacatgatggttgtcattagggttaatactttggaattctggattttttcccaagagagtgtctacgctggaatattgggcttgtggctttctgctgatgtgcatgtgtgaagaagctacttccacttattaggacttgtgtatctgtctcgcagtttcactacctattttctcgtgatgttggtcaagtcgcctaacttttctgtgcctcatttacctaatttgtagaatatgggtaacagtacacaagtgtgagtgtgtatttcccaggactgaccactagagggcgtgaaggcaccggcacttactattacagcaatgggtgtagtagtgctcatggtcgtaaacatcattctcccatgaaaggaaccagggcttcctgggagaaataactgattccagggctggggccggaaagcacaagcggagcctggagcatctcgtgaggccagaaagtaaggagccggctgaaaaataatggagatctgtcgaaaggtcacagatgccaaccagaaggagctttgaatgaccaattttgagacaaaatgagcactataagaaataatgatagtaataaattccaacccataaatacccatgagttcctactaatataaataaataattgaatacataaatatataaggatgaagaaacagctttttcttacagcagaattccaattaatgaatgtagaaggaatgatcaaatagaaaatcactatttggctaacagcacagtcaattgtttgtaggcaagaattatcaatggactttaaatatgaatgggtaaaagtatgatgatgctacaactagtgagtaccaagggggaaaaaaaagtacgttgagaagaaacaggctacttccatattcccaaagtatcacttcaggagctacttattgattataatgggacaaatagtaacttacagtagagaaacctggcaacagagtctctccgaggtacaaaggctctcttcaggaaggaggtaaggggaaggaagaagaaaacactgtcctgcctcaattatttgctttccccattctcaagtgtacttcatagacattcaaagatatgtgttgatagtgtccacgatccacatggctctattatagtcatttattcacacatacattcagtgaggctttgagtgcctaatgtgtgcctgatatttgctagatggtggatgctgagaagatcaggtgtgctgctgtctctagggtgactgaatccacctgccccactttacagatgtggaaattaaagtgaaaaggatttataggattagttcactgtcacaaggtcactagccttaaagttacaggagtaaagcaagtttcctgacttgctagattttctgctgcaggtgctgacaatggtgagctccaataggagagaggacactcagagtgaagtgggagccctgaacaccctggattagccaagaggacatgccgggtccagctgtgaccgcacaaaggaccattggggatatttgtattctctttttcacttagagcttgaaatgaggaaaactaagtgcagaaaaccaagagtggaagatttttcacaaagcactggtaacatgcatcagaaaaccctgtgctgatgtctgtcacggtgtttctcactgaacggtaatagtctggctttgagtgtgttccctctacagcctggagttctgcgaggcagggaccaggtgtgattcatctttgtctctccagtgacagtacacagcaggctctgataaatatttcttacaaaataaaatggaataaaaagtagacatctgcacaggtgtgggatgactgagcagcagcagaagcaggaaaagtcagcgtccccagatcagctgatgtggtgttcggattctagataggggtgaggtgccaggatggggatgggggtcctgtggctctgctgccctgggggacacccctaggtttcacagtgcctgctgtggttgctgcactttgcttccccatgggaaagtgatcagagggtgtggggcttcaggtgaccccatgtgggaaatggccaagggaaggtggggtgggcggcacatggttttttttaaccaatatttgaaggtaggttgtatgaaaaggtgttaggcttatttcagcttatggggagtaggacagggattggtgagtgtgtatcaggtatattttggctcaggatggaaaagaactgtcacagtaacataaggtcttttgggaaattacatgtttactggcagagttcaggccagggctgggtgtctgaaaatacctgtcagggtcacttttatggttacaagggcagagcttggcttggaaccaggtttcttactaataccacatattaagtattataaaaactgtcctttgcaataggacattgctctatgatgcaggttgaggtccctctgtttaagtaattgtgggtggctgtgattctctcatctagtctgcgacttggacttcacctccatctgcagtccctctcctttgctgttgacactggtcagagttaagcgcatttactgacgatggtcacagggtggcagcactgcctctctggtattttctaaaacctcttcctggaactgagccagtctaagaggatgtcatgactaagaaaagggcactaatgaggtgaacagataattttttttttcttgtttctcctgtgaagtaacagagtggaggtgagcatggaataattgccttttagaaatggaagacaatggagagaagtgtttcgcaaaccttaatgtgttcacagatcccacacagatctttttattcaatacagattctgatttttctggtgaggcctgagattgtgcatgtctaaggagcttttggatgatgccattgctgctggttggcggaccacactttgagtagcaaggctcgaagatcatttagaggttaattctcactgcatctaatttatggatgaaaacaaaccaaggtccagagagagcatatacagcttgcctaacaaagccattccctaagtgcctgacttcttgcatttaaacccagggcttcagcctttgtccagttctcactccacacatcacacggtttgttcactgttgtgaacgacagttgtggcagcatctctttagtttaggaatccagagccccaatttcactaccctctttggtcttggctcatgctgtgacttcgaatagttttgcccttacttaaaatcttcagtggctcttttgtaatcacaagatcaagttcgaatatctctgtctagtgttcatggctttataacatatggtatctctttagtaaccttacctaacttccctgttttaaaattgtctcttgctgccatagccctccttgctccttcctgctccctaacaaactgtgttcacttctctctcagtggtagtgatgatggcatggcctctgatgttagactcatgtaacttctaatcccagatccaccaccaacattggcaagttgattcatctttctgaggataagcatcctcctctgaaataaacttagatggcggttgagaggggtaaataaaataacacacaaacccactctcatccctgagaccctcttcaaaactagcatataaaaatagctatttgaagaggttcagtgaaattcaaggtaacacagagaaggaattcagaatcctatcagataaatttaatagactgaaataatttttaaaaatcaggcagaaattctgtagctgaaaaattcaattgacaaaccgaagaatgcactaaatctttcaacagcagaattgatcaagcagaagaaagaatttgtgagcttgaagagataatatatgaaaactcagagtcagagagacaaaagaaaaaagaattaaaagaataatgcatgcctacaaggtttgattattaagctactcaaagagatacaagagaagggtgaaaaccaacataaagaaatgtaaaaaacaatcagaatataaatgaaaaattttctaaaatgctagctagtttttttttgagacaggctcttactctcatcacccatgctggagtgaagtggcacagtcatggctcactgcaggctcaacttcctgggctcagatgattctcccacattagccttccaagtagctaggactaaaggcgtgtgccaccaggccaggctaattttttgtatttttagtagagatggggttttgccatcttacccagggctggtcttgaactcctgggctcaagtgatccaggagattcactgccaaaaaggatataaccaagtcatatagtcataggttatctaaagtcaatgtgaaggcaagaattctaagagcagtgagacaaaagcatcaattaacttataaaggaaaacctatcagtctaacaccagatttctcatcagaaaccttacaaaccagaaggtattggggtcctaatcttttggcttcttaaacagaatagctctcagccaagaatcttgtgtagagtgaaattatatttcaaaatgaaagagagaaatacagtctttttcaggcaagcaaatgcttcaggatttgtcacggctagaccatcctacatggaatgttaaagggacttctaaatcacaaaacaaaagatttaaatagaacagaatagaacctcttgaaaccaaaaaattcaaatggcctataaaacaataacacaataagaaaacaaagtagataacgatcaacatgatgactggaacaaatattaacattgaatgtaaatgacctaacactccacttaaaagacacagattggcaagataaataaaaaatcacaaaccaaatatcagctgtcttcaagagactcacttaacatgtaaggattcttatagactcaaggtaaagagatgataaaagatattccatgcaaatggaaaccataagtgagaaggaatagctatccttatatcatataaaacagactttaagcaacaacagtaagaaaaagacaaataaggcaactatataatgataaaaggatcaatcaaacaagaagatattacaatcctaaatatatatgcacctaactttggagctcccacattcataaaacggttatgatgagacctaagaaaaaagatcaacacaaaacagtgagggtgtcctgggttttctttttattggacagcagtgtactagcctatcactttcccagtcaggggatttttggtctccccattcccctaccatgggttcatgccaaagtccatattttttattagtgtttggaattggattttttttttttgaggtggagtctcgctctgttgcctaggctggagtgtagtggcacgatctcggctcactaacctctgcctcctgggttcaagcaattcttctgcctcagcctcctgagtacctgggactacaggtgcatgccaccacacccagctaatttttgtatttttagtagaaacgagatttcaccatattgtccaggcttgtatagaactcctgacctcatgtgacagggaaacaggcactcagtgaacttcatgcgattgaggagttaatgataatgagagaagggctgtgaggggacagcactggggacaccagagcctgtgacgggctgagttgctgtgccttgggagatgcccttttgactgagccctgggaaggagggggtgtgggggcaggagctgcctgcagagggagtggcctcaggtgggcggccacctggctgcagggaagaggtgacagagttcgtgtgcagagcttggagggtgaggaggaggtgggttgaggtgaccttggtgagggtgaaccatggggggctgtgggccctgctgagggaggccagccagccctggacctacagggtggtttggtcttttttgtcccattcccagcatccactgagtggtgaaactctgcaggccagggaccatcccactggccagaaggagcgcacagtaggtgcccactcagtgcatgttgggctggacagaacctcactctgccccctgcccccagctttgggagctgcagcaaggtccctccccctagggatctccatgcctctgtctctgaggggtgagatggggagacttcaaagggccatctcagagtgtgggggatagagacgcagaagtgtgggggatagagggaggcctgggctctagacccaaaggaccttacacacctcctgagtcttttcaaatggtttcttctgttactttaaaaatgatgtaagtcatcatatttattgtaaatcccaggaatctaatcatgcgtaaaataaggtgtcttatccttgaccccaccccttccccaattaaatttccaggatgttaccactgtttgcagttggtgtgaatctctctttaataatactctgtttatctcacttgtcgttttacgccaaaatacccattgaattatattattgctgaagaccattcttttttttttttttttttttgagatggattcttgctctgttgcccaggctggagtgcaatggtgtgatctcggctcactgcaacctctgcctcctgggttcaagtgattctcctgcctcagcctcctgagtttctgggattacaggtgcacaccaccacacctggctaatttttgtatttttagtaaagacagggtttcaccatgttggtcaggctggtctcgaactcctgacctcatgatccaccctccttggcctcccaaaatgctgggattacaggcatgagccaccacacctgcccagaccattctgttctactgaatcatgtgtggtgggcacctcttatatcaatacatatggattttatcttgtgtttgttattggctcccctttttctcattgcatggctacactcaatgctttgtccacacccctgttcctgggttggaatcttgtgacagaaaatgaagtaacaaaggctaaagctttctaaagtggagtcaggagattgcaagacaattgcactttcaccagcaagagctcaaaccacagaatgttccaatagatttggataaacagctgaagtcagtattcaccagccttcaacatctcaactaggagaaccctaaaattaactaagcacatagaatggaatggacttgtgatttaggattccttctcagccaatgagctgcttctgaaaacaactttttgtggaaattacctgtaaagaaaaccctctcctgtgcttgtcttacagaacactagtcagggctgccctgattcagtggacccgaattgctattatttgtttcctaaacatatggtattttctgtgaccttcatctcaatcttttttttaagttactgggctgtttcccagttttcataatgacgagacattctgcagtgtttcatacacatgtcttttccccatgtggagtattgatccaggagctcattcagtcaacgcatgtttatgaagcatcctgtgccaggctgtgggctggtcactgtcttcagcagagagaggacaggcacagtcttgccttcacagagctcacagctcagggaggctcttagaagtgggatactggtcggagcatgtgcacattaaacatgatgaggtcaaggttgctatagggactaaaccacagtcccaccaagatcgcattgagttcctgtggtagaccagaggtcagggcccctaagatgtcctgagcagctccctctgctcagaagttttggttccacaggtgacacacctgagcacaggtgacccctgcagaacctgtgattaccacccaaagccaagagtgagtggtgggtgttctaggaggaaccgtcacctccatgggcagggttggggaagactgaggggagcaggtggctgatgactttggccagaaggtagggggatgggcaggtgtgcgctcatagggaagggaagagaagggagggcattgcaggcaacaacacaaaggttggaacctgccttcatggactgagaaaagcagggagtccacccaggctgcagctggggagggaagacatggggagcagtgggtctaggggagaagcagactgcgattgaccttggggactgggcagtgagcagaggtgtgttatgtgtgtctgtccccatcatagatatgaggaggggtgaggccgcgggtggcacctgggtcggtgggatttcatagtgcctgctgttccctagagcctctctgtatagagggtcagaatagatctgaggctgtggtctgggggaaggggctggtggtgcttaccatctctaggggtgggaggagagggatgaggatgcccctgagcagtgaagcctcaaggtgtgtggagccacagttgtctctcattagacatgtgttttgcgtgaggatgccagggcctggtggttattactgttgtcaagtttgcatgacaaggacccaggtatccagggatccagagcacagggcccctggtgaggggatgaggctcagatggggctgaccaggttcatgtggtcagagtgggagggactgatggagagacagagcctcaacccctcctgtcaggagctgtggctatgtccaggagagatgacaaggatgacccaggacattgagtgagtcattgagacattgaaggtgaggacagggcagagaggaccctggtgactgctgaaatgtaggatgtgaggagggctctgacccatgcaagttacaggacctccccacccccgagcccacagatgacccttaaattgggcatcctgagtgctgtgtgtgcccagcagggacactggataggctggacctgagtctctgtaagggcagcgctggtctgtaggaccagagtcttctctgtgggtgtgacgtgggcaggaattagcaagatgggggtgacaaggcttggcttggaggatctggtacagaagcccatgggcttggtcagctcagcttctcaggggctcagctggggctggaggagcaggatgctgtgctcagggcatgctccaggcagcgtgatgtgtgtggttccagggtcaggcacgggggtcaaaaattaaccatgaaaagttcccaccttctgtaggcagagaaaatggcctgattgtcagggtcagggagacttaccatgtggccaaagcaggctctcagcctcccagagaccacaccctgggtgcagcactcagctctgcagggtatggcaatagatgtgccaagaaccccaacatccagatgcatgcaaaaattttgcgatatataaaatagagcagatcaagtttccctgcaataacgttgttcctggttgtgtctttttcttgtaaactagacatggacatctttccagcagtctgttctcatctgccaccttcctgctgcagcacctcagaatgaacattcctgagacactgtccgtggtgctgacgaccaagagctatggaacagagtgtgatgtagaatcttctagttacctctgctctcctttcacttttaacaacagagcatcattaacaatgagaaggtggagaggtgttcaggatcttgaagtgacttctgtcttgctctcccataaccctgaagctgctgtagacattattgcagaaactgacaccacagtcaggatggccttgtccaggagcccatgtgcagtttgtagtgagcaaggatgagaaaatggtcttgaaaggggtgatggacagaacaggggcttttcaaaaatgtcacatcatcacccccagcatccgtgaatctgtcacatggtaagagaccttacagattaaatgaaggattatgagtttggaagattattgtagtttatccagatgggtccaacataatcacagaatcccttccttacaaatgagagagggaggtgggagagtcagagaaggaggaggagatgtggggatagatgcagaagacagagcggtgtcaagatgctgcactgctggctttgaagatggagaaagaggacacagccaaggatgcaggaggcctctaggaggtggaaaaggagaggaaacgcactctgccctggagcctccagaaagaacgcagccatgtgggcaccttggttcaagtttctgtgtcacttagcttgtgggaatttgtcacagcctcaacaggaacctacagaggagtcaccttgtgtgcaggtgggatccagggtcatttacagctaaatcctgatgtaaatattgcaggttgcttttcctacttcctatctcatggccaacaaccctggacaatggcagaacacccttggaaaccacggctctgtgctttagtggagggaccagcttgtttgtgggaaggtagcacctggtccaagtgaacctacatgagatcgttactctccccagggccctcagggaagggctgagaacagctggcccaggtgtgtggaggagctgcaggtgaggcagggctggaggggcctgtgggtccaggtagaggggcagacaggttgtcccatcgccatgggagcctgcacgagctttaggttggggaaccctgctcctctgacctggacgctcctgtgtggagaggaggcttgctcagtgagatccacgccagggggtaaattgggaactgatgggaaatgaggggctagagtcctgggtagtgcctgggaggaccttgctcaaggactgaattcttggtctgttcccaccttggttactctgacaacccctctctgtgtcccacggggataaagatctcctgagcagtggccattgggacagaggagaacctggtggccagagctaagcatccaggatcctggatttggggacaggcaagctcattgctgggggacagtgatagatacggcctccagggcctgggtgaagagagcaggagggctcaggacactggaggctgtgtggaggtcacacccacgatctgtaccacccatggatgctcctgcattgctcacctttgtgtggacatcagatggccccaacttttgcactcctgagacatctcatgcattcacagagggacccaggctggggctgtgcatggccttggtctctagggtagtgtgaggacagctgagcactcagctggctgggcaggactcctgcgaatcctgccctttcctgtgtagggtccaccccagcctgactcctaaccccctactcctgtctttccagggaagagagactggggttgagataaggtggagatatttttcctgtgtgacccaggagagaatggacatggagtttcaggtgagtttctgctaagttcccatgagcagaaaaagagccaatgagaggaagtttcccctttattcagatcctttccaggtgaccccgggtgggccataggcccattcactttccctgcaagcccccgcttcctgtggtgatgggaagccttcgccttggcccacccagagcccggggcagtctgttgaggtctctatatattcagcagggacccccatcccttcctgtccccaggcctgtgtctcctcaggactcagagctggttctctggctcaggctccatgtccttccccatccccagggctgggggcttcagggacgctccatcaacccacaggagcagctcccagaggaacctaagaagccacatctgctttgtggtcgatccagcagtaaatgtttgtgtcagagtgtagcaattccagtaaaaacagagaagaggtcttgacccctgaggccttctcagaacagggtctggcatctctctctgggcccacccagggctactctgggactgaacctggctgtgctcagggggttcctgctcccaggcccctccctcctctgctcaccacctcctgttattttcactgcagtttcctgaacttcagctcagccagatgccagtggggacagatcctgggtctccctggggcccaagggaccagaatatctgtggcccccactcacctcatagatgagagcagctgccctggtgctgggtaggggaatctgggcaggggagagaggggtgtcaggggacagggaaggattcctgctgtgtaggaattccagggctctcctcaggtgatggagggtcccagggtggggttagcacagggagtggatgatcctggccctgaacagaggcccagctcatggccagggcaggtctaaccttatccaagtcattctgggtagggtgggtttgtgctggggattgacagtccccctgccctgagcctgcacagctggggccccagtggaaatgggattgggaacggacagtcttacctaggagatggagctgtcagagggtccatggcctggggacagagacaaaagtgagcacgagagtgttaggatagctgggcccctcctgcaagagtgtgtgggggtcctcagttcttagagaattggggagagggagcctttctcaggttattttaggggtcaagtaagcaagtgaggttgaggaagtgacccatgacccagagcccggaggttagggctgacccggccagttggggtttcctgtgtgatgttttatgggatcctctttgcagccccagggatagggtcagaggcccctgggtgtaactggcaggagtggacaacttggggctggcttagtagttcccagccacacccagactgaagggacactcaccgggggtggaggctgggggctgctgctccctgaagtcactctgatcgctggccctaggaaaggtcagggttatttgtgaaggtgcaaggttaaaagtcacaaattggagttaaaataggggaccaggaaaggagcctatttccaagaggggtatggagacctcctttctttatggagttctgtggtaggaggggcccaggtgaggggagttgaggaaaggccttacaaagccacatctgtcctggccagaggggaaggactctcaggcagatgctgggccaggagaacattgatccagtgacacaggaaagggactgaggacccagggaaggaatcagaccaccaggggttgcctgagaggaagggtcaaggcaccagggggaaagcagggccaggcacatgtgcaggacactgaggggactgcatgcatcttggattctcctggaactcagtgtccctgctgtgaccagacactccactcagggctggagatgctgaaatgggacaatgatcttgtcttctgtctctgccctttggcaagagacataaacgacattccaggatatgccatattggggccccggttctcccttctcacagctcagtgtctgcagttaccatgtcagtcaaaggggtgctgaccccacccagcccgtccaggctgttccagtctccactatgtgataatgcccaggatcccccctcagatgccctctcactgggtggatggattcagtgaacagggggaggtaccaggtattgagcaccgctcccccctgctccaggcagctgtggctttgctgtgctaggaaactaggaccatgctcaggggcatggccttaattggactgaattcactgaggacaaagctgttgaggaagcagcccagggtcagcagctggtgaggaaggtgccatggaatgagagggaaggatccctggggagtcgggaggctggggagagcctggcactgaatacaagacagggtctccttccttctcgcctggggtcagcgtgaaggatgggagcagaatggggaaaagctgtggtacctgccagtttttcggaggagcaggaaacacacaagtgcagccaccagaagactcccaaccaggaccccgatcaggatgcctagagtgttgtcatctgctgaaagaagaaggcaaaggggatgaggtccaaatctgttccagggggaaccatgaggggccttgcagggcaggggcatggtcagggaggaaggaaatgccatggagcctgagtgtggtctgttgtgctgtcctcatagctggctcccttgctctccgtggttgcaccattttctgtgtcttaggcttgaattactgggatgcatcaactcctacattctcccacaggaagcctgcacctcatcctgctcctgtgttttttagtccctccttcctctcacatcactcctcttccccctgtttctttttttccatcccatggcagtcgtaaagggcaggcccttgctgccaactcaatgctgatgagcagggatgatgttcattgactgttttcaggggccttccacatggaaggcacagtgggaatcaatctacctgcagcttttctcaccctcccattgccttgagggagaagggtatgtgatattgtgaaatacgtatttggtgttcatcaccattgatatggttaggctctgtatccccacccaaatctcaccttgaattgtaataatccccatgtgttatgggagggaccttgtgggaggtaattgaatcatgagggtgggttttttccatcctgttcttgtgatagtgaataagtctcaggagatcagatggtttcataaagggaagcttccctacacatgtcctcttgcctgctgccatgtaagacatgcctttcaccttccatcatgattgtgagacctctccagccatgtggaattgtgaatcaattaaacctctttcttcatacattaccaagtctcaggtatgtcttcattagcagtgtgagaatggactaatacagtaaattggtaccagctagtggagtgctgctataaagatacctgaaaatgtggaagtgactttggaactgggtaacaggcagaggttggaacagtttggagggctcagaagaagacacaggaaaaaagtttgaaacttcctagagacttgttgaatggttttgattaaaacgctgatagtgatatggacaataaagtccaagctgaggtggtctcagacagagatgaggaacttcttgggaactggaacaaaggtgactcttgttatactctagaaaagagattggtggtattttgcccctgccctagagatctgcagaactttgaacttgagggaaatgatttagggcaactggtggaaaaaaaattctaagcagcaaagtgttcaagatgtgacttgggtactgttaaaaacactcagttttatgtatttacaaaggtatggtttggaattggaacttatgtttaaaagggaagcagagcataaaagtttggaaaatttgcagcctgatgatgcaatagaaaagaaaaatccattttctgaggagaaattcaagccagctgcagaaatgtgcataaacaatgaagagcaaaatgttaatccccaagacaatggcaaaaatgtctccagggcatgtcagagaccttcctggaagccccttccatcacaggactggaggcctaggaggaaaaaatgtttcctgggccaggcccagggctcccctgctgtgtgcggcctagagacttggtgccctgcatcccagccactccagccatggctaaagagggccaaggtacagctggggccatggcttcagagggtgcaagccccaaaccttggcagcttccatgtggtgttgagcctgcaggtgcacagaagtcaaggattgaggtttgggaaccttcgcctagatttcagaggatgtatgaaaatgcttggatgtccaggtgaaagtttgctgcagaagcagagccctcatggagaacctctgctagggaagtgttgaagggaaatgtggggttggaaccccgacacagagtccctactggggcactgcctaatggagctgtgagaagaagaccacaatcctccagaccccagaatggtagatccactaacagcttgcaccatgcacctagaaaagctgcagacactcaacgccagcctatgaaagcagccaggagtggggctgtaccctgcaaagccacaggggtggagcccaaggctatgggagttcagctcttgcatcagtgtgacctggatgtgagacatggatacaaaggagatcatttcagagcattaagatttggctgccctgctggattttgggcttgcatggggcctgtagcccctttgttttggccagtttctcccatttggaatgggtgtatttacccagtgcctgtacacccattatatctaggaagtaactaagcttgcttttgattttacaggcttataggtggaagggacttgccttgtctcagatgaaactttggacttggacttttgggttaatgctggaatgagttaagactttggggaactgttggaaggcatgattagttttgaaatgtgaggacatgagatttgggaggggtcgggtggaatgacatggtttggctcttcttcacccaaatatcaccttgaattttaataatccccacgtgttgggggaaggacccagtgggaggtaactgaatcatgggggtggattcttcccatgctgttctcatgatagtgaataagtctcacaagatctgatggttttagaaaggggagttcctctacacatgccctcttgcctgccgccatgtaagacatgccttttgccttctgccatgatttcaaggcctccccagctatgtggaactgtaagtcaattaaacctcatttttaaaaaaattacccagtctcaggtatgtctttatcagcagccaagaccagctcggtcgcggagatcctaacccagcagtgctagaggaattaaagacacacatagaaatatagaggtgtgaagtgggaaatcagggttctcacaggcttcagagctgagagccccaaacagagatttacccacatatttaataacagcaaaccagtcattagcattgtttctatagatattaaattaactaaaagtatcccttatgggaaaccaagggatgggccgaattaaaggaataggttgggctagttaactgcaacaggaacacgcccttaagatgcagattgctcatgctattgtttgtggcttaagaacgcctttaagcggttttccaccctgggtgggacaggtattccttgccctcattcctgtaaacccataaccttccagcttgggcattagggccattatgaacatgttacagtgctgcagagattttgtttatgaccagttttggggccagtttatggccagattttggggggcttgctcccaacagactaatacacccattttctggtatgtgactctaaagtccttagaatcttcaaagtgatgtctttttcaagctaataattgactgatgactggcagcccctaggcaacttcagaatgaggctggtcactgacccaggtaggattagagggttgggactttcagcctcacccctaatccctggggagggacctggagtttgaattaatcaccaatgaccaatgaatcaattaatggccaatgattgaatcaattaatggccaatgattaaatcaatcatatctatgtcatgaaccccaaaaggactgggtttgaagagctgaacccatggaagtttctggagtgtggtgcatctggggagggcatggaagctccacaccccttcccacatgccatgctctgtgcatctcttcatctgcatcctttgtaaagtcctttattacaaaccggtaagcctaagtatgtgtttccctgagtcctgagagctgtttgagcaaactaatccaacccaaacagggagtcatggaaacctcaatgtgaagccagtcataagaagctctggaggcccagacttgtgactggtgggaaggtggtggcaattttgtgggactgagccctctgctgatatgtccaggtagatagtgtcaggatggaattggaggacacctagctgatgtacggtgcagaactgattggctgctgggtgtgtgggagaaacccccccgcatcacatttggtcacagaagtgtgtctgtgttgatgattgttattgtggagtgagagcagaggaaaaacacagtttgagtttttccaaacagggtggaatcccatctgccaatttagaatctgaaacttatagtttcagtacttcaattaagattgaagtacttcaattcagtacttcaattaagattcagtacttcaattaagattcagtacttcaattaagattacagaactggtaagtgaaagtgatacaacaaaaatgtaaccaaagtctgctcaacttaacagctaataacaacaaagttcataaaaataataccagtcgatattgatagcactgattgagccctggctctgtgcatgaccttgttaagggctttaatcgcattaatctctgaataaatatcctcacaaccaccctgagatccaggtgtttgtaacaattctacagatgaggaaactgaggcccaggaggttgagtgtcttgcccaaggtcaaatacctggtacctattgtaaccaggatgataactggatgagtctaatccctgagttcttacccacattgctccccaggctctgaaggaatctcatccttctcattccgtgtatcattttacaccccccctccctcctaggaaaatatacaaggaaaggagtgagaggggccgagggtcactcacattttacagtcagcttgagggggtcgctcctgttggagctgactgggttggagacctcacactgatactccccagcgtcctcctgcctgatggggtctatggtgagcatatggttaaaccaggacagcttcatcctcttcgtgacctgcagacgctggttgttgaaaatccactggaaagaggttccagtgttatttgtgtggcaggtcaggaccacggagcccttctctgtgactgtggtgctgctggcttggatggagggctgagccactgactctgtggatagagtgaccaacagaaagtgtcttggggccatgctgcatcctcagagatctcagagtcaaatttagaacattctcctgtgaataaaggagaaagatgaaggacagggaggagcagagagaaccagagacacccatagcagcgagcagtagggactacagtgacctcagagaccccagggaccaggaggacccagctgcctcagaccaggaccagggagccctgaaaaccctcccacagatgagcggccccagagtcacatgagatgcaatacctggggtggctttaggagcaggcagtcagagaaatggaacatgggtctcagcccctaagggacaaggaagaggtgtggccagctcctcctaggatcctacatccaggacccagtctgtaaagaggttatgattattcctttcttttttcattaattccctccctccttcatcagagaactactgagtgtgtgtctcagttgggccttgtgcaggtacagggtgtagtgggaagagaaagctgagtcctttccttcatcctcccatgggagtgacatcaacaaatcaagaaattcatgatttcacgtccagtgagggaagaaatgtggatctgatgggagaggcttggacaatcctggcattgagtctgatagttgagacaggtgatttcgttctaagtaaaaactgactaattctccatttgcccgtcattcctcagaccagaatctccctctctgagctgaggatgcccaagaagaaaggagctgaaccaacatctggtcctggggtccacagatgccccacggtggtggccacgaccagattctgggctgcagacacacggtggtgtgacgttgagcactgacagcctgtgtgatgctgatgcaatttctctttaataaaatggggtaaatgtcaatggtccctggcttgccatcctctctgtaaattaacattaaaatatttacaattacctgacctaaagcttggcacagaatagctccaaataaacatcatctattattattttactccaaaaaaaaaaaaaaaagagttctctgggcctgattcctggtggagaaggagcggtccagagtgtcttttctctgctttccctcctcctgaggacagtgcacttcccgggacatcttttaagtttcccatccagtttaatggcctgggaagtttgtttgtctgtcctctccactctgactctcaggtgaaagatgaggctctgcccttgcccagatggggctctgggggctgagccctgcctggtgaccagctctaggaaccacggccctgggacagctggtaaatcgttgctcacaatcagccctgcccaggaagccacaacccagccctggcacaggctccccagggtcatctggagtcaggatcttgggacaggggcctggggcaggggcttgaagggctgagcttctctcagaggatcctcaggccaggccctgactgagtcctataagatctttctcaggtcatgtctatgaggaggaggccaagcggggttggactgagactgattttcccccgctgcatctcccgcatcagactatccttcttgctgtagggaatttccacggagtccggataagggaaaggaattctgatctgttatagtttgtctcccctgggtgtgtcctgcactaaatgcccaaaccccaacatgggacgtaatgcagagggggatgcaggcacagcccaggcctgacaatcctgcgtatgtgaagcagaactgacccccaacacccagaggcacggaggaatcactcaccgtatacacggagatggtgagatgcctgttcaatctgagaatttctgtatgtgacttgtagggtgtagtatcccgtgtcctctagggtgacgttctggaaatgcagatctccactgggtgatattgtctctcgaccgctgtatgcaggccctggagtcctaacgtgagtgtctattacatatgctgcgattagctggttgggctccaccgttttccctttgtaccagccatagctgtaaagattctcgggcagataaaccacagagagatgaacattctccccttcagcaacttcaaagggcgctgatgcaataaagagccaggcagtggtgggtgcgttccagaaagttaaaagtgaggctaggaaagggagagaatatcagtcaatatttgacctatgcattggcatggaaagacggggtcctgggtgcaggtctcttcacccctcagccttagagggtgtgtgtgtgtgtgtgtgtcctactgggtcaaagtcagcagcatgaccctcattccttcagtacctctgaccttggcatttccttgtgtgaaccctctttcccaggggtctgcatggttccctccccactgccttcagttcctactcacacaagggaatccctgggagacttctttcgtgaagcctcctctagagaccctgggtcttccctttctgacctttcccagctctgttccctccagggctcttgtcagcacctgacctcacattctagatctctttgggtgtctgtcttcccccccatgagattgtgagctctgtgagggcatggacttgagtgatgttagttgcaccccagtgcctgggacaggctgcagactcctgtggatgagttcatgagcgttcccagggccttccatatcctggggtttatttgctaatgtctgaggttggcagatgaagacagagtttcatgccctggtggtgtttttatttaaattgtcactgtgatatagttttactatcattttcaaaatgtagtggccactgacaatgaacttgaaaacatggaccaactgagattgttttgccccttggcaattccagttcacttagattttttggttctccttagacgctctctcccctgagtctctaacaaaagccctctgtctcctctcagagccccatcctccccaggagaccccagccagtctctgtgctccctcctcccacccactcccagggagtcctcccctcacctgtgagcaagagcccctgccaggggatgcattctctgtggggacaagctgaggggggccccatggtctctgctgcctgctctgtcctcctctgtggagaggagcttgggctccaggaacgctctagacagggttactgtgactgttgtctctgctgtccttccttcctctatgctgagcttcctctcaggcaggagcacttcccgtttatgggcaagggcggggctctgcctacaatgtctctctgtcccctcccctctcagtcctgcctcccttgtccctcctttctccttcctttttgcctatatttggttccctaggcaaaactttgagaagcaacgctgatggggtcctcataacaggacgacccactctccccagtactgacctctgctgtgttctggccttggttctgtcacagccggtagattatttccctttgtgacacacaaaaccagctgggccctgggtctcctcatgctctccagtgctccaggaaggcagaatgatgcccagcaggaaagtgacagaggtggctctgggggctagaaaggggctcactgggtgatggctgggaaggacccacccgctatcttcagtgtcaccagcctggcctctgacccagggacagagacccaggcctggaggtctcgggaggatccccagctcctaggtgtggagggaggtgtcctgtgtgtcctgggaagagaggactttgatggaaggaggtgggaggctctgggttctgctgtccttggtgaaggtttcagggggaccctctccatgtctggggtctgtgcccccagcttaactctcattctctttgcaaatacatatattttgtggatctgcagttgcctgaactgtctcatgtccctaaatctttgtatccctttttacagaaggtcaggaagggtgtgtacatgagtatgaggactatctgatcagggcgagtgtttgtttcccaaagatctctttagatatggtataatacataagataaatgtactgaattagcaattttaagtgtagaattaaatgatactaattctattcacaatgttgtacaaccatcaccataattttttaccagaaaatcttcattataccaaatggaaacttcatacttttaatcaataactccccacttccccctgccccacccactggtagcctctgatactatcaatctctgtgaatttgcctagtttacatgtctcatataataaggaattatatacgtgtattatttttttctggattatttctcttagggtaacacttttaagattcatccacgtcgtagcatatattacagcttctttcctatttatggctgagtaatatcccaatatatgtttatacctcaattttaattcattcatctcttaatggacatgtgggtggtttccacatttttgctattgtgaaaaccgctgcaatgaacttacacttggaagtatctgtttgggtttctgtgttcatttctttgggggtacatataggagtataaatatggggtcatgtggtagttctatgtttaagtttttgagaaacagccaaactgttttccagtttgctgtgctattttatattcccatcagcaatatacgagggttccattttctctacattcttgtaaacacttactatttaatattttttaaaacttatagccattctagtaggtgtgaagtgatagctcattgcagttttgattttcatttccctggtggctgatgaagttgagcattttttcatgtatttactgacaattttaatattttttagagaactatttattcaaatcatttgctgtttaaaaaaaatgggttatctttttattattcagttgtaatagttctttatatattttagatacaagtcccttatggggtacatgatttgcaaaatttttctcatattctgtgtcttctcactttcttcatggtgttctttgaagcacaaacatttttaactttgatgaagttcacttatctatttttaattttgttacttatgctcttgatgtcatattgaagaaaccattgcccaatccaagatcattaagttttactcctatatgttcttctaatggtttgataagttttgctattccatttaggtttttgaaacattttgagttaacttttgtatgggctgtgaggtaggggtctaactacactatctcgcatgtggttatccagttgttccagcacaatatgaagaggctaccattctttccccattgaggaatcttggcacccatgtcaaaaaccaatgggctgtaatggtgagggtttatttctggactcttgattctattccattgatctctatgtgcattcttgtgccagaagcacactgttttaatgattgtagtgttttagtaagttttcaaattaggaagtgagtcctccaatttttttttccagattgttttggccattctggggtgacttttaaaaaagatgtagttcaatggttctcaaagcaggagtggttcagctctccttttttggcagtctggagacctttttaggaccttaatctaagtagataaattattcccactttcttttctgagttgctatgttacagtgtatattgacacccatgaaataattgagagaccctggaagtgcttgcctacatagtgagggacaattagttccatgatcatgggcacagaagattttgttttgggaaacaattttgttggtggagttatattcatgcttactcttttatttgtcttcatagcctgcatctccttcagacttcatatctgtttattttcttgtttgtcctctggggtttgggtgttgggtgaccagtcagctggagctggaggaggtgcttagcaaggcagtgaccctggttgggaggagcagggctcagcagggtgaaagtagctgggccttgagtcaggagtggcatctggaaggcctgactgtaagggtcagaagggccagcaggtgggtgtcctaggcacaaacggtggctgctgctgtggactggaggaaggtaagaggccccgagtattccatgttcttactggctccccaactgaggattcctctcctgggctggtgctgtcctgcagcagggaggggttagacagggacggctgcacatcaggccggagtccatgtcatcctcttaggcactgtcactacagattgaggattctgttcataagccaagcctttgcacaaggaagggacccgggctctcaaggaagagcagctcctggtcagacctccatctccttctctctcattgcctgaggcctcaagcttggtctacctggcacaggggtctggatcctcctcccagggttggggtcttactgagctgggcacctgcaggtgggagaagatctggaggggccccatctgccttcaccagattgatgttgagggtccctgagtcctgcaccactatcaggtgctgagcaacttccagtgtcagtgacaaccaccccatggtggaagcagaaccacctcgtgagaaagcacctccaagcctcagtgcttgccatgtgtgggaatttgctggtttcagttgggggcatgttggtgggtggtcatgaattcagggccggattctatgctcacagtgcacatgctggatgtggtacagaccccaggcagggctcagtggggtggttttgggtgtgcacaggtatcttttctggaggagctggtggtgatttggctcccagaagttcctgagctctgcagactcaccaagcactcaatatttgagtgaacattgggcgagagagcagaaggtaagtgtcagggcatcggggttggtgcctctgggaagaggaggaacattctgggaacaaagctctcccccggcttacagggagcttcccatcgctcctgccttgaggatcagggaaactagggcctctgctcttccaggggctgcttgcaggcagtttgctctgggagggggtgacccaggagttgcctctcattttgcatttgagatttaaaaggagaagggacagtatatcttgccaggtcacaaaaattacaggcatcatattgactgaagggcactcctgtcatcactgcaatataccagaatggtcttttaaaaaaataagtgatttaggtttaccagcaactgtaatgcttgttttattcttctagttcaccgttaatgtcacttttgtagttttagcactggcaatgttgattttatgttgactctgatgattttaagctttcatttgttcacatagagatcatcttctttctgaatattaatgcattttttctctatttctactggttattcctgtacatagagtagagaatcacttttcccaaggaggtggaaagcttctgactaccaaaaaaaaaaaaaagtgtcaaaatgctttaaagtcagtaacttaaagatcaaatccaagagtgggcaacagattctgcccagggtctgaaaggtggagaggtgactggtgaggatgtttaaaagacctctcctctctactccctaaatgggggccatccagtgttcttgaggttcagagaaggcccagggctggggcagcagggcactgtcagctcccagctcccaggggccaggagtaagaccccaacactgtccagacactgattgcattcattttgggggagagtagattcttatttaaagaataatacaaaagtctacaaatatgaacataaacagaaattcctttgctacaattttccccttaataagacattccttcctaatgacatatgtgactgcattcatggctgagatgttttctaggatggtgagagcatcagagtggactatctggtgccttggggtcatgcattttcttcttccaatgtctacaggatcccccatgtcccactttgtagtgtaactcagtgtgtgtcattctggtttttgttgtatagatccttggaaagcccatgtcattcctgctgtgaggtacaggcagccaaatggcatcatctctaaacatgccttctcctggtacatcaaattatggaataaatgaaagccattttgacagatattgaagatataagtttctactcttcccacacatgcttctcccaagtgaaggattttactggtgaattgttattagagattagtgtggatcagtgactctgccaggggaaattttgccctctaggggacatttggcaaagtctggaaacattgttggttgtcagagctgggggagggagtcctgctggcattgagtgggtggatggtgctgaacaccctgcagttcacagagccccaccagtttgaccacccaaatgtcaatgctgaggagtggagagccctgctgtgccctcccgcagcttccctgaagcttcccctcacctgctcctcccatgtctccccaccacttccccacttcacccgcctccttacacctcagtcccctccacctgaactcaccccttagtccaaggccagccctgatctccgctctcctggtctccttgctccttagcaggaggcgcccactagatggcgcccttgcccttactggagctcaccgtctccctttccaccctgagacaaatgtggctgcttttactgccacaaccccagccctccacactctagatttgctcagggagcagctcctggacagacctcagggaccccagggaggagcctcactctggagattttgatggcatggtctttgaacttcactgttacccccagtcaggatccaggatgttgggagtgcatgattctgcccggtcccacttcagcaggaccccactgctgagttgtctgtggggacccgggcctctcatctccttcttgcattgcaggagagggatcttagcactgctttcacataaagtcagataatggaggagtgcaggtgagtttgggaaggtggacatgaagagaggttgtgtccctagaggtggcagcagtgagaggatgggcaggtgggaggaacacagcccatccagggttgccagccatattaggagcgacagcctttcctctaagcctccagcctttttcctgaaacattccagaactttccacttcagcacttcccactgaggctcctcaggtctgtccctgagctcccagctgagcctacctacccatctgaaatcctgagtcctgtgtcaccctcgttccccattattctgtgcagttctgtgggacgcccagctctcctgacacccccagtcttcagaatggccatcagcgctgtcgctgtggcaccagggtgactgccgcctggaggctgagtcctggcttcctgacagctgtggggcccgctctaggctcccttgtcctgatcattcatcacctccaggatgcacagcagctgggccagggggaggagcagggacaggtgtcagccaccctgtgtgtctgcaagtcaggctgggggtgtgggaggacgccaggaatgactgaactttctgatttagagggtgagagcttgcactgatggaatttgggatttaataggaaaagcatagcgttttcctattttgtaggcagggtggctggagtttggaatcatagattcccctgggatgtcactgtggacctcagtcccacccgttaggggcacagatttcagaatccacaccctggggcaaagcaggcatgggaggctccatcagcctggccagggctctctatttgtgcagctgctgcaaggagatgtgcactctgatgggaacagtgctccctcctccttggggggcagtatctagctccctgcagcccctctccctgcaggccctgccctctctgaacctcaccttccccaacccgccccccgcaatcccatctcagctgtaatcccaacactttctcatccattatgggtggactgcttgagcccaggggttcaagactatgctggctggacaatatagcgagttgttgtctctacaaaaagacaaaaattagctgtgcatggtggcatacacctgtagtcccagtcactcaggaggctgaggtgggaggattgcttgagctggggaggctgagttggcagtgagttgagattgtgccactgtatacttcagtgtaggtaacagagcgagaccctgtctcaaaaaataaaagtaaaaaaaaaaaaagaaatatggaatacattattgttaactctaatcaaccatgctatgcaatagtccaccagtaataccagtaatagccaataatgaattatctgaaaaagaatacaatttattcttagctatctactgctaaaatttttaagctatcttttatgatagctgaaacaaaagaagtaaatttaaccaaggaagtaaaagacctttataatgaaaactgtaaaacattgatgaaataaattgaaaaagacacacgcacaaatagaagatattccatgttcatgaattggaagaactgatattgctaaaatgtccttaccacccaaagtggtctacagattcaatgcaatttctgtcaaaacaccaatgatattcttcgaagaagtagaagatcctaaaattagaaaccacaaaaattcctaaaacctgcacaaaacaccctgagttgccaaagcaatcttaaacaaatagaacaaagctagtggcattacacttcctgacaatcaaagcatactgcaaagctatagtaaccaaatcagcatggtcctggcataaaaacaagcacatagatcaatgaaacagaataaaaatcccagaaataaacccatgcatctctagctaactgattttcagccaaggagccacatgcacacaatggggaaaggacagcctcttcaataagtggtgctggggaattggatattcatatgcagaagaatgaacctagaccctatccctcaccatgcacaaaaaattaactcaaaatgtattaaataaagacttaaatgtaagaactgaaactatgaaactactagaagaaaatatagggggaaaatccatgacattggtctaggcaaagagtttttggataaaatctcaacagcataagcaacaaaaccaaatataaacaaacgggatttcatcaaactaaaaagcttttatacagcaaagaaaaaaaaggccagcagagcaaagagacaacctacaaatgggaggagaatatatttgtaaatatatacatatatatttgtaaatatatacatctgataagaagataatatccaaaatatataagaaaattatgtttctgtatagttttatctgactgggatacagaggccacatccacagtcccatcctcaaaggccacttgttcccaaaatgtcaagcacatccctcaatgatccatcatcaacacctatgtctgtaggatgaagggtgaatcatgaagcactaaaaaggaagaaggaagccaatcccaaaacaaaatgatgcagggtctggaaagtccaaagcattttttttttttttttactgcatcttcctcctttcttctccacattcccaatcctcactattgattaacaaaacaaaaaaaactgggacccaccatcttccctactgtcaggagatctagcgagattgtttgagtcttagaccaaactttgccataagccaaatttctggctgactttacaatgatatgagctagcacagtctctttttctgccagtcaacttgtgctcggttttatttgcaaccaaatagaggtggtaaccaaatataggtgaccctaaaattagtcatcaggatgaaatcctaaaatgtgcaacaaactgggttgaattcaggattagtagcaacatctctgttgtgggcttgaaaagggggcacccttttatgcagtagcaaaattgctaaattgttgtttgctgagtctttggactctcatcccggattttctatgaccattcaaacagggctgcaatgaacatctatggttgtttagcttggcacacttctacatttctatatagtaatatctagaagtgcatttgctcaatcacaagatatgcacattttataattgactgctatcgaactaccttaaatagccttaatttgttctcaacattgtttaacagggtctgtttaatgtcctacgtccagcaaggacagtatcacttttcttaatatttttcaaattattggaccttaacaaatacttaatgtgcaattaattgattcctttgtattcccatgccttcttttatatgtttccttatagtacacaaaaccacattattgtttctttacttgtgtcattccaccctggaccattcctatctaaactataacattatgagagagagagagagagaaaacaatatgaaaatataaattgattaatcaaaaaaatttaaataggacaaatcaggaagacacaagagagattttaaaattattcagagaataccacaatagctgtaccaatatattttaaaacttagatgaaacggacaactatctcgataaatgtaaattaccaaaactgactcatgaaaaaatggatattatgaatagagcaataatcagtaaagcaattaaaaagacagttgataatttttatttactgacaacaataacaaaatttcaggtcctgatatttttatggtgaattttaacaaattttcaagctcctcctcaaccaattctcagaaggtttaaaactttaacaagaaaacactttctaacacattttcagaagctgttatagcatgataccaaaaccacacaagaaaattatagaccaatctcacttacaaatatacatgcaaaatcaaacaaaatcttagtgaaccaaattcagaattaataatagcaaacaagcaaaatatgttatcatacgtatggcttatatcaggaatgcaagtatgtttcaacatcagaaaatacttctccacattaacagactaaaggagaaaaacgcttgtttaattatctcaataggtttttagagaattttgaaaattttataaagttatgcgtattctgtaaaattgatgaaatccaaccttgatttatttttaaaaattgcctttcctatagaattataggtaaaggaaacacatgcatcctcacagagctacttcaaggctaagttacttcccataagtaacgtatcctgtaatgtgtgcttggcacatattcaatactaaacaaatatttgcaaatcctcaaaccacttctcgctcaaataacccacctttgtcttttgcctttatgttagggttgattttctcaattgtatcttggagatcctttggtgggtctttcagcaattaccctgaatttgcttttctgtttacaattttaattcctgggaactctttcttgttctctgactgcacccttttcatgagagttcagccatcaatcctccagaaccccaccccccccgcccccccaaaaagcaataaagatgtctaaaagcttccttctgggctttcgaatgatgtttaccccaggcatttgttctattcgttcatcacccattttccctacaacttgcctacacttgatatcagatttttatttattagtcacctatcttcttcattggcccattttcctattttgccactggttgttctcaaatgtgttatgattcctggttgtacagtcaagtggttgataatcttggatatacgataaagatttgctctgtagctgtgtgtaagcctatataaaagcttttgtatttttcttcttaaaaaagacaaaagatggttgggaagatccctccagttcaccagttcgaggctgcagtgagctatgatagcgccgctgctctagcctgtctgtctgtgaaaaacaaggggggcggggggcgggggggaagactggagatgtaaatctcccgcagggccctacccgtatccgcaacaggtctctaacaggaacagcctcaggcctgtgttggaacaaggtaggttacagaaatctggaagccagatctgtaacttcagggtaaggactggctctcagggctgatcccccgggctgggtgtcccagaggcacccgcccccgccccttccccaaggcaggccaggacaccttcactcctctccttaggctccccacccccttctcctccccactgtgcctcctggagtagcggtggcggtgccacaggggagcggggcggggcgggctctgagggcaagggggatgggccccgccggggtcactggcggccaccctggaaactcgacgcaggccggcccttctagtgaatcgtcccagccacagctggcctcccagccgcgcttggggcgcctcggggcgcgaatggtgcaggttggggagactcaccacgcaccgtcgggggtcggtccggttattcctcaccgctcggctccagtgggcgcgcgggcctctcctcctcagttcctgcgctgcagtccctccctcacccttcgcagcttgggaatccaactgtgtcattccgacggagcgccgtgaggacctccgagggtgttagcgccaagtgatctctgtccagcgctctgaatatccaagtaaaggagttcaatgaagggcgggtcaacggaggagaaaccgtgactctctcaagggagcccaaggcctccttgtctaattagtgacgcgccaatggatggaggctcttcccaccatctcttcccagcatccagtgacaccaccgccaagggacgggctcggcggaacctgcaggaaagaagcatcggctgagcctgactgcagcgctgtgaagagacaggggaggggatcagtagttggtcccgcgcccaccccctgtttccgcgaggggcggagttgactggccatgcaggcagagggcgaaatgtgaaattccactactcctaccgtttttccctgacccgatggggcggagtgtcgtcaggctaagttccctggcggtaaggtggggagattgaggcgcacacctgccgaacggtaacgcaggattagctaaggcgagctcaggacagaagcctcccgaggagcaggagggcaaaataataaataaataaataaataataaataactcactccttggtctttatttgcggcaggaattcagaaggtgaaagcggggccttaggatctttctgaccttttgggttttaagcaggaggtgtcagaaatgttaccacagggctagctggcttgtggccagcaagcgttcacaatgccctcgatttttcatccctctctgtgggttctttttttcattgtaaggcagaatttctacgattgctcacccactcagagaacctgagctggtttagaccaggtgagacaggctaggtttaccctggtgatgatgtgttgttgccatggcgatcctgcccagtaccagaggccctgcagattcagatgcttggtgcctgtgcttggctgaggggccaatgggtgaagctgccatctgcgggatgatgactgaagcctctaagtcagaatccgcccaggctgagccttagggcagctccatggagcctcggctggcctgggatagagagtccaccactgtgccagcccccagccactgcctaggtcctgtgctgagagccccttgtccagggaaatggcgtccagtggaaaagggaccacccccttgcccttcactcaaggcaggttggtgacaaccctgaagctaatccgttcctagaggagctgcttctgggtccgagttttctctgcagcagagcagctccctggatgggatctgttcaaagtccgcctttcacgcggaattttccgtccttgcaattttccacctccaccactaggggatcctctctgaccgcctcatgccggctctggcctctgagcaggggtttctcttctgcatgtgcgaccttgcgcatgcctagtggccttttgggacctagagctgctccacaccccgatggggttacagagtgcctcgcctccactccaccccaccagggttccttccctggctgggatgggatttcagaagcgccgaggaacagcccagacaggtgtgggagagtagccaaggcccctgtcccggggtggccaggacagcggtggcctcgcataggacctggctgggctgctgcaatcagtgtcctgccccttggagagcaacagtgaaaacaacaagactatcttcacccaccttaagaaagaacagaaccagtatccccaactctgctgtgtatcccaacccaattccattccccaccccactctcagtagccaatatgcaaaatattagaatactcttactgttattattttcaaccacactctgcatcctgaaaaaccatatatttcgttatgtgcttttaaacttcttgaaaatgaaatactgaggctgggcgcagtggctgacacctgtaatcccagcacttcgggaggcggaggcaggcggatcacgaggtcaggagatcgagaccatcctggctaacacagtgaaaccccatctctactaaaaatacaaaaaattagccgggcgtggtggcgggcgcctgtagtcccagctacttgggaggctgaggcaggagaacggcgtgaacccgggaggtggagcttgcactgagccgagatcgcgccactgcactccagcctgggcgacagcgccagactctgtctccaaaaaaaaaaagaaaaaagaaatactgaattttcaaatacttgctttttttttcggtcaaaattatgttctcaaatttcactcctgtagatgtgcgtggctggctgtagtttttgcatttttattattaggtattctcctgttgcattaatatgccacattttatttctctcatgtttttggtgaccacttggggtgttttttggttttgtatttttgctgtatacatgctgccatggtggacatacctctttatacatatttcctgttgtatgcagacacaattttaggatgtgacatcttcagcttttctattgtgtcgtgtgtcttttccttcgtgctttgtgttatttacatattctggacacagattctttgtcaactgtatgtgctgcacatctctttcccagtttgtgtcttcttcttcttttttttttcttaaaaaaaactttctttatagtgttttttttttctttctttctttgttttgttttgtttttttgagatggagtcttgctctgtcacctaggctgaagtgcactggccgatctcggctcactgcaacctccgtctcctgggttcaagtgattctcctgcctcagcttcccaagtagctgggattacaggtgcctgtcaccacacccagctaatttttgtatttttagtacagatggggtttcaccatgtttgtcaggctggtctcgaactcctgacctcaggtgatccaccctctttggcctcccaaagtgttgggattacaggcgtgagccacagcacctggcctgtgttctttcttaagtagatgttacttttaatataatagaatgtatcatattttgcttttatattagtactttttctatctaattcaaacacatccccaagggtctttgtgtgtagactgaccaatttctcaagaatcatgaatgaatactgcttctctttccccaatttatctgtaatgctacctttattataaagtttctatgcatgtgtagaaatagttcctgatttttcactctgtgccaccagcataccaatagcacgctgtcttaaatattaaatagcagagctttatgagacaacttgatgtgcagtaggcaattgcccccttgttactcttcttcagggttctttgttgtaccacatgaattttagaattggcttgtccagctaaaagacaactgcaaggattttatttggaagttcataattctatacataatttggggaaagtattttcataataccaagtcttcctattaatgaacacagactctctctctctctcccccacccccacctgtttagttatttatatctttatggtctgttagttattgtttattgtctttcaaccaggtttcatgtttttctacatagaggccttgcatgtgaaagtctttcttcctagcttgctattacaaattttttttaattgcactttttgggtacagtggcttgtactgtaatccccgatacctgggaggctgaggcagatggattgcttgagtccagaagttcaagaccagcctgggcaacataatgaggtccctgtctcaaaaagtttgttttaaaaattgcatttgctgttattcaacaaatgtcattgtgtctcatatatggatttttatatctgataaccttgttcaacaatcttttgattctaacaatatatcagattcttttgagttttccatatagacaataatgtcatctgtaaattataattgtttcttctttgttatttcttggaccttttattttatatttttgtcttgctgcaaggcaatatccctctatatattgtggggtcttttttctcataaagtggggatggtgaacacccttgtcttgctctctgattgtataaagcatgctttctgtagcattttgtagacgctcttttttagattgaggtaattcacttttatttctggtttactgagtttttagcataaattcaggctgaatttgagctaaagctttttctggagacatcatttgaaaaattcatatgatttactttctttaagtcaccaaagttatgatttacattgaactgagtttctactgtttaactgtattcttgggagaaaacccacttgtcactgaacaatatctgttttatttactgctgtcttgtgtctaaattttcttttaggattttttgtatatgctcagattagcctgttattctcctttctgtatttttttctggtttgggggtcaaagttataatagcctcacaataagagctaagaaaccagccctaatggaggccggggcaggaggtttggagttcaagaccagtctgggcaaaatagtgagacccccatctctatgaaaaatagaaattagccaggcatggcagtgagtacctgtagtcctaggtacttgggagggtgaggcaggaggattgcttgagcctaggaatttgaggctgcagcgaactatgattgtgccactgtactccagcctggatgacagagcgagaccctgtctcaaaagaaaaaaaaagaagaaataaaaaggaaaagataaaagagctaagcatctgtttccttttttccattttctgggagagtatgtgtaagactgtaattaactgtttcttgaataatgggagaactctgtaaaataatctggctttggtgttacctgtattggaaggatgaaaaataccaattcagtttcattattggttgatagggctactcatgctttttgttttgttttgttttgttttgtttttgagaggaagtctctctgtattgccctgttgtccaggctgagatgcaacgttgttcacaggcctgatcctggctcactacagcttctaacttccgatctcaatagatcctcccgcctcagccttcccagtagctaggactacaagcatgcagcatcacatccagcctcttttcctgcctgacccagttctggtttcctttagttttctaggtgttcatccattttatctaatgtttaatgcatttggcataagggtgctcagtgtcctttcattgtctgttgtctgtaactgttgccattttcattcctatttatgagtactggcgtcttctctcactttttcttaataatcctgctggaactttgctttttaaagaacatcttttgacttgttgattcttttttcatacatattaactattttcttattttttgcctttatatttatttcttttcctgtttgaaacattgctcttttcttactataaaaatgggtaagtagctcatgaattaccacctcttttaaaaatcttttctactgtaagcattttagcagtttacatttgcccacaagtaccacttcagctacaccctatgtgcttttacataaagtcttcatttttggtaagacatattctcaaattttaattatcacttgtttttaaatccatgatgttttatttgaaatgttgtttctaaagatacattttctggttatacttttattcttctaatttagcacagtggccacaaaacatggtctgtgcagtgcatacaatcgatgagtaatttctgagctgtagtatttggcataatatatggcaaaatttcctaagttttccatgtgtgctttaaaaaacttccagtaaaatacataaatctgttagatcaagcttctcacattgttcaaatagtctatatgtttactgattcatttgactgcttgatttatcaattacaggtaggaatgtattcaaatctcctattaaagtgtgacactcaagtggctttttaaagacagagatgccaaaccaatgaatacatgattttccccaaagcctgcacaaattctctaatgaaattttaccatgaaagtttgtttaattaaggcttactaaagcagtatgttgtcttttactttttaaacagagaatatatattttaatacatcgtttaagtttatgattaattatctattactgaggataagaatctttgcctgtgctcattcagcatttgcacttcatttatgatctgccttctcatagcttctgttaatttttatactagagacatttatttgtttgtataaatgttgaaggtttttttttgttgttgttgtttttgagtcagagcctcgctctgtcacccaggctggagtgcagtggcatgatctcggctcactgcagcctccatctcctgggttaaagtgattctcctgcctcagcctccagagtagctgggactacaggcatgtgccaccaagcaaggctaatattttgtatttttagtagagatggggtttcgtcctgttagccagggtggtctcgatctcctgacctcatgatctacctgcctcggcctcccaaagtgctaggattacaggtgtgagccaccgtgcccagctgggttttttatattataaggagatgtaatagatagatagatgtttcaaagatagtcaaatgtttttaaaatttaaaacacttttttacaggttgactttcaccatttaatttcatctatgtgttttgccttagagaaattttaaatgctatgtagatctcatgacttataattatgaagcattttgttttctgttttccacgaaacttagcttaactttgagcatataatagttgtaaaggtaggagagtaacactgaaaaaaggaattgcataaaaatggcacattttctgtagagttgtttatcgcctgaaaataggccccatttcatggaagtaagatgatcaggctcaggtccccagacgaaactcttggcatggtttttggagatagtccagggctcagtactggctctatcatttgctacttctcccaaagtaaccaatatctcatccaccctgagcccatttccatatctctaacatgaggataatagcatctaccttacacaccaagtagagggatcaaatgtaggaactaaatcaaagtaccagcactgaataacctacatcctcccacttcccaaaaggaagagagatgtatcccctgttgacaaacgagaccattttgcaggagagaaaggaaatgccagttcacttgcaatgtaaacatgctctctctttttagggatgtccagggacctgagagagaacccatgcttaccaaagagtttctagttccagacacacaggactcgaagggtgacaagtatggttttcagggtccctgaatccacccagtcctcacagaaactcctaaaagctgtcgattgacagcgttgagttcacagctctggtcctcacatgctgatactgcttgtgatatcgaacccgacaggaccccacatcacaattgatttaccaactacaatataatacctcctgaatctccaaattggctcacccaggaacaaaggcttggggtaaaactggattaggagatataagctctgaattttctgagggtgagacacacaaggattctaagtgacacgccacagagtaacgggtctgtgactggaggacccacagatttgtcttactggagacaccacatgcacacaaactccatccttagctgtggaaacaagggtcttttgctatcttagccgaattctgggagtaatttttggaggggaggagatctttgggattgcctctttcaggccctttacaaaaatacctacttcttaaatggtaaagcttacactaaactgaaaaaattacatccttggctttttatgaagtaggtgttggattgaatcactactggaagaagtatggcatcgcaaattctaagcagtggtcaaaggatggatctgttaaattagaaaaatctctaaatttataaaaagattttagattcctttattctaaacaattgacctatttgtactcatgggacaatcaaatttcaaaggagatatgtaacgatttcatggcttgcattaaaaatccttctgataaaattaaagataaaaaatctgaccccctgccaaaaaaatcttttgaagttcatactgcctgctttcaatattctgtgggattcacaatgaaaggtgccttatattgtggcctagcttcaagtttatgccttcgccaccatggcctgggttcaattcccagtcagggccccagcgcctttggtttaatgtttgcgtggcatttgacttttttacctatttagtattggtgagattacctttggtaaaaaaaagtttaaagagtggaaatcgcaattctttgtgttggctaaaatctgattataagagatctggaaggttttatttttctttttcaaagagctctatggtcagaagtcggcttcatgaaaagctaatatttaattatatgtacatacagtctttctggattttctcttttgcctcctgttttgaaaaatatttggatttgagtgaaactccgttttagaaattaattgcttggtacaatatacccatgtaactaccctgcacatgtaccccctgaatctataataagagttgaaattttgacaaaataaaattagattttgaattaaaacaaataggtgcttggttcctctgctcacttctttttaaaaggaattcctctcccatgtacttcttcttttcccttctttaccttccttttggcatctttggtatcacatgaagggatctagagggaattttaagtgactctgaaattccttgagaaatacacaaaaagatcccactcaccccttttgggggtctcctgttctccttgtggagtccagagtcagggacaggctcctccaggtctgcagctctgctctcttttatttcatcttggctgattgctttggttttgtgagtaccaggcattactttgtactgtgagagacacgtcctttgtgagtgcaacggctgctgggtcactggtgagggctgcagtttggagatggctgagagccgttgcaataaatggttgtgattgcagggggctccttgtttctttgcaagtttagatgagaaaggtgcagtttggacacagtttaaaggctgtgaaaacaccaccaatgaatatgatttcctttggggatggtctgattaaaagtgggctgattgttgctgtgctactagccttgaagacatgtttctacagcattgtgcagtgtggaaaaattgtgtggcttggtcttgtggcatgtcccttcttttagagacctcagattcaatgtgaaattcgggatttttgattttcaaagatctagatgccctgccttccagatgtgcctactcttcacatattttaaaattagatcctataaactgcaaatactttgttggcttctgtgagatcagaggtccagttagaaaaggaagacagtttgttaaaattaaaaactatttatctaatctaactagattggcctccaaatatgactttctgacattcagctggttactctgaaaagatttctaaatctcttgaggctcatctatatgtttccttgcaaagaaaaaaaaaaaaaaaaaaaagcaagcccaagcactagtaagaaaaagatttgcaatgtttcatgaaaggagtagatgagtgaagcatttatttgtagatactgggttggatacctgtgcaaagaagaagaggtcaataataaaaattgccaggggatttcttggaacttaacaagctgaattaaatatagaaatgtcaggaaatcaaggcaggaaatactcacttgtggttaggcagacagggcagggttctgagcttgagatggagcaaacagttgtggtgggtgaagttcacatgctttagagctcagctgtcctagtaaagaagcctaagagtctctaaagctcttatgagaagatggattttttttgcctagattaaaaggttaaagaattgctttaagttggataaaataaagctaaatgtttaagcaagttgtgaaaggtttatgaaaaaattaattaaaatatttttgtgtgtaaacatattgactaaagttgaaggggtataattcagcatttctgtaaattgagcattgaaataaaaacacaatgggtttctcttagagcactaacctgctctttaacaaaaattgtaaagggttatagaaagtctataaaaatgttaccttatggtcaaacattaaaattgggtaaatatgtctatcaggttttattaagaattaggtttaacattaatagtacactaatgtaaaggtgaaatttggcttatttggtacaaaaatcatacaggaagcattgtgaaatataaaatgatttttagctttctttgggctatatttctataaatatgttattgatgagggttccaaagttatgggagactcctataattctgctatatctcagtgtacattatcagtcataattataattgtcatgttaaattattgtgggccacagaggtaacagatttccttgtcaattgtgtctttgactatgactaccctaaaacgttcagtcacccatatacacatgttaccttgttttggccctctttagaaggtaattttataatcagctataaagccctaacaggtgctcttaaatgcaaattttgataactttggagattgtgacatcagaagagaggaaaaatgttcgggacacttggagagctaaaatgttcattgatatcaagcaggacaggaattaactgcatgaagtgaactaataggaggctgaagtgatctttttgactttttgcttaaaacgttgctgatcctttgttttgcttttcagagtcaaggcaaattttcttttgagctattgacagcttttaacgattaatcaaaatatactcctatgaacaccatttggagcattatttgtttctctctacccgatttccccagaatttggaaactatttgtgggtattcttaatttatggcaatatagttatttgcataagtgcaataagaatgtgttttctttggtaacaggacacaatttgaaaaactggttattttaccaaggttttgaccagaatgctgtgctttcctttaaggaatcaaacttgacttgtggagctaataaagcctttggaaaactgaccttatatcctgtgaacacagtccctgtacagggttactgatctgtgggaagaaaagaatgtcacattctgacaggtcaggaatcccaagttatcttgaaacttcaagaggacaggaattcacccaaccatatgtatttgatggtagaaatccatggcaggggctcagctttaaaaagtcttatctcagattccttctataaaacaaagtcccattaaaaccaattttaaaagcctatgtgaaaaataattattcttgctgcacctcgtacaaataaagtggcaaagcataataaagcaaattggtcctgtcgtaatttgtctttagtaaaaacgggaaactggggtcgggtgcagtggctcactcctgtaatcccagcactttgggaggctgaggtgggcagatcatctgaggtcaggagttcaagaccagcctggccaacatggtgaaaccccatctctacaaaaatacaaaaatgagccgggcatgatggcgggtgcctgtaatcccagctactcaaggggctgaggcagggaagcggaggttacagtgagtcaagatcgtgccacttcacgacagcctgggtgacagagcaagactccatctcaacaacaacaacaaaaaagggtaactggagagagggaagttatgtttcaaaaacttttggaaactatagtacacctgtttttaaattctagtctggcattcagtttttattattttctacagtttgggttaaattcgtatttctctggctacaagtctcctaaataatcttttcatttgtttcctttttctttccctttttccccatttttcttaattggaaatcactgaaacctaagctgtgctttcttaaagccctgtgaactgaagactagacaaccgaaacttctgaaggaagtagcagcaacctatttatatgtgttgctgttgcctactattatgttttagcaggtgctgcctctacacccccgaaacagagagtgctactgggaacaaatcgactttttccactccagtgctgcattcggtgccccataacgatgaccccctctcagcaggaagtagccagaaagattacaatgctccatctccctatgattcttgtgataaataaatatacaagcatgatagaaatcatgcgcaaattgacagtggggattgtggcaggccagatttcactaatggaggtccccatcacaactacttcagtactgactgagtggttaagttcagtatcaaaagctgaaagtgccagcgcctttctacaaaggctagaatgtaacaaaagcccaccaagggttttacctaggcctttcctgggccttacagcatgacaaaacaaagaaggaattcttaaccagacctgtttaggattaaacaaatttaattgggggtctgaagaaactcgccaggcctccacaaacaagttcattgggggtctaaaggaaccccccccaaacctctgtgattgagcaggagacaaggtcagggtaattgccccagcacctggactcatttagatttaagtaaatgtactgaggctccagagaaaggtctccaagacttagactagagttacagattaaaagaagttaatcacttatatctttagataaatgcacactgacacgtagacatacatcttagaaaatatataagctctggaaaaccttgtaatttacagttggtctggagatattttctgggccttctctctgtaaccggttccagaaataaaaaactctcttcctccccagtttatctgcatctcgttattgggccgtgagaaatagcagccagaccctgagtttggtctgggaacacactggctgggcttcctgcctggcggtagagcttcactgtcctccttcccagccaaaatgtggcccttgaaggcttcctccccaactgaccggttttgggttctaggtactcagggaacaccgtcttcaaggaggccattttcatactgttcctggtttgatttttctgaaattaggaaatgccccttgaggcatccaggattgtctttatttcccctgaagcttcccctcctgaagaaaaaagttctcaaacaccctcaggactcaaaccccaagttcaccctgtgaaacattcccatttcctaaacccaggcaggctcatggccctcagcctctcagaccccatggaaacctcctcccccacttcacgggttctctccatattgagagcctcccctcctcggcacacaacccagagactcaccccaacatgtgtagcaaatcaccctggaaacaatcatggctgaacgtggtagcccatgcctgtaatcccagcactttgggaggcccaggaggtggatcacctgaggtcgggagttcgagaccagcgaggccaacatggtgaaacctcgactctactaaaaatacaaagttcactgggcattgtggtgtgtacctgtaatctcaactactcaggaggctgaggcaggagaatcacttaaacctgggagacagagattgcagagagccaagatcgcaccattacactccagcctgggcaagaagagtgaaactacatctaaaaaaaaaaaaaaaaaaaggaaaaggaaaagaaaaaaaaaatcatgaggcaacattgcatttaacaatattttatttatcaaaagacacttgtctttctcaggtaagtgaaggtctagagatgaaacgagtcccgatgtaaattgccccatgggcattgctgagatcacaagatcatcactgcagcatgcagcacaatagtaaatttctcaggatggaagttcaacaatccaaaaggtagtattttttttcatgatgctcagtccatcatacgaaataaaaataaattccttttcatgatcatccattcagtagaaaaaatgatagtaaatttgttctcatgaagatttttaccgtaacatataggatttatcgttattattattattctttgttttttgtttttttgaagcggagtctcactctgttacccagtctggagtgcagtcgtgcgatctgggcacactattaacctccacctccagggttcaagcatttctcctgcctcagcttcccgagtagctgggattacaggcatgcgccaccacacccggctaattttcgtatttttactagagatggggtttcaccgcattggtcgagctggatttgagctccggacctcgggtcatccgcccatctcagcctcccaaagtgctgggattacaggcgtgagccaccgcgcccggcctcaatttatcattattcacgcatccacaaactgggttcttatattttgtacgtgattttttccattgaggagagatatctgtgcatattcatgctgctcatatttcatccacaaactcggttcatatttcatccacaaacataattttttccgttgagaagagatacttgtacatatttatgctgttcaaattcacatttcatcattcttttacaagaaatagataatgtattttaaggttttccagtggtattacagatattttactgggtgtatagatagaaattaaaccaaacttctttgttctggccgccagtcatgcatcctgttttcaacatagttcacatacaactggttgtgtaaaaatgaaattattttgtttagtacaatcatcaacagttggttgattagatttttaattatcaagttaatcattgtcattatgcttctcatcgcactcgtcattaattgctgtgggaggaaatttgttatgttccctatgagagggtgtatcacaaattcaaataagaattcaacgacaatggactgtataaaggaaataagcaagtccatggaaaacatatttttttccggaaaggattaaaatatttttaaaaaggaattaaaaaaaaattgggcacggtggcaaatgcctagagtcccagctgctcaggagatggagacagaaggattgcttgagcccaggaataagttggaggctgtagtgaacagtgattccaccactgtactccagccagggcaatagagggaaaccctctttctaaaaagacaaaaagaaacaaaacaaaacaaaaaaacaccacatcaaaaaacccaacaacaaaatgaaaaaccaaataacagcaatacaattggagctattcgatccaaagaagtaaatgaaacataaagcaaataaaagagaaaagctaatacctgtgtcctgcaggactcagtccaagttctgctctgactccctcctggtgagccaccccttaaaaagtcacttggggcggggttactttgacagacagtcttctgtcaaagagggaggcggtaaatagcacttttttttttttaatttaacgcctttccaacaaattagcggctatgttgtctaagagtgcaaatgtcagaggtgggtacaggcagcaagaccctccccacaggggcagcagaaggaggaatgactaagggaacaagactttagtgtgctcaactacacaggacaggaaacagatgctttttacaaaagctggtggacttgaaggcagaatattttcaagttcctgtaactgcgaactatgacctgtagcctgtgagagtgactttctgtggcaaaggagcttttgtgaatgtgaggaagttaattatcttaacagtgggaggttctcccggcttatctagctagaccctcgtgaaatcccaagtgtccttaggaaggggaagcagagagagatttgagtccagaagaggaagaaggtgatgtgaggcccagtaggggaacaaagggcgatggcatgtaaacacttagcccccagaagtgggagagggctggggttcatcacaccagaatccctaacaatcagccttattttaattacccttgaaatggaaggaggccttagagagccagaggcttggaggggcaccctctgctgcatacacagatcccaactgctgtgggctccaaataattgcaccagggaaatcacaaattatcaaaaataaaggatgtaaagcttttaaaaaatattaaaagcccaacaaataaaaaaagttctaaatctataaaattgacctcagtctgtatatttagatgagtcatgtgtatatagcgtttcacttcaaaatatatgataaatctctcattcattggcttaaaaataaacacttcaatcaagtctttatcagaaaaattgaaacgttaactcaattgccttttagttcatgtgactttacaaaacttaaaacaataaagtcagttttaaaaattattagtaaagtaaaagaaaaatatcttcacaatgtagacattttgtccacatgagacatgtgaaatattgccattactaaatatttgcaggtcaaaaactgtttccaaaacattttaaataatcatctggcctgtctgttttagagcattcaattctagctgaggtctggggacatgtgaaaggagccacggcccgactccgtgctgggaagagtcagacattttccacagctctgtcctttgctgtgggctctgcaactcctaccaattaaaattgcttacgtttttgttttatttttactaaagaggggttcctaaaagctaacattatactgagtatatgtaactaaaactactaagaaaacaatttcacaattatacaaatgtgccaagtaaatgaaaaaataaactgtattttaataaaggttataaaaagaaaaacatatagtggtgtgaggactgtctcaggtcttcactgagcaagggatcatgacattctatggcggacagctgaccttggctttctgctcctcttgattatgtctactaagtgacatacttactctttttccacctgtcttgcctctaagggtaacaggttttatgagatccctcctagtgctttgcaggtcagcctccctttgctgcattccaattttactgcctataccctccagctggcttttgatgacaaaagtcctggtcccagccattctcagattctgtcatccccgtgggcactatggagctcagcactatgggaggttccccaaaaatctcgttttctatgaggaatggccaccacctgcatctcagtgatgctagtgacccctttcctactcctgtgctcactggtcctcatgaagatcctggttggtctgtagccccctatttttcctattaaagagaaattacagtaagacccatttgtgtgcaaaatcaattttaggcttattacacttggcctgataatttgcataaaatgcagcaagaattcatcggccatataggctacttttgagttaattttcctgggtttttacctaaaaatatactattttggttagagtcttgtgaaaataaccaatgtgttcaattgttttattttaaaaggctcttactgaacactataaatatgtataagttgaatatacaaactatattgtcataaaatcacaacccaaaatgtggagaacgcagagggaaaggtaaatttgctcgcaaaaacatacttcacccaaataactggaaaaaaaaaaagactttcatgacccttctttaaccagagcagcagctttcaaacaaggtgtttgccttggaaatgccattcacaagccaaacggcccttgagagctgtctgtcaggcactgtagaatctagcagctcctcacagagttagaaatagtttcaggaaagagattccctgcttttagtaactgcactttatattcccagatagcgagattgtatgtaaaccatttttatcttattctggaactcttttgggtactttttttttttttttttaaatgatggagtctggctctgttgctcaggctggggtgtagtggtgcgatttcagggtatgagaaaatgcagctggacctggctctttccaggaagaccctcacagccaaggagtccaaagcctggggttttcatctaattccagtgtgactggggtaggagcagctttggtgctgggtgtgtgtgtgtgtgtgtgtgtgtgtgtgtgtgtctatgcctgtgtctgtttagggtgttaggctcgtggttgtctagatacaaatgtcccagggctcaggagccccagggttatgtcaggggcaccagatgaaggtgtcaacagaagttagggcacaagggacaaaggtgagagcaaggttagattcatttaggtgcaagaaatcatagagggaggagggagaggaagccctcctgctaccaccgaggaagaagcgcagcttaaggcagaaagcctgtccggagaggaagtgagtttgagggcagggctctctgggtaaagtacggtctgggacaccagcctgggggaagggtacagaatgcagagtggcctggcgtggggactaagaacagaggagagcagctttcactgggagggtcagtgttttcagtgtccagcactgagcaaggtgagatttgggcagcttgctgtgaaataaggtcaggctctggcattgtccccattgcgtgtgtgtgtgaggggcactttgggagagtgaactctccacctccatcctctcatacgtccttcaaccgagcttgccagttaccctgattccaaggagatctatttattgttgacaatactggatcctagcagaggctgggtaggagcctgggcacaagcaagtggaggagggggcctgggcctgaaagacctgggaggtttgagagaggacacagcccacagaatggagcagatggggtagagtcggcaagcattcagggctcctagtaagttggacaatggagaccctgaaagatccagtaaaacggggagaacaaacaggtccccaactcacatccttgcagtgcctggagcttcagactccagacaggtggggaaggaaaattgagggatgtgaacatgttggagaatgtcgtgccctgaagaatgaagaaaaggggggtgaggaatgagagcaggaacggcttccagtgcctggtgcccaggagaactcagaaaatgggtgtggtggagaggaatcgaggaaccggaagtggtggaagtgtgcagggcccctccgagatcactgtgactgccaggcgtcctccctggctggagagcttcactgtcctccttcccagccaaaatgtgtcccttgaaagcttcctccccaatggactggttctgggtcctatatatttgaaggggtggcctgcctctccacacctgtgggtatttctagttgggtgggaggagagacagagaaaagaaataagacacagagacaaagtataaagaaacaacagtgggtccaggggaccagcactcagcacaccaagggcctgcaccggcaccggcctctgagtttcctcagtttttattgattattattttcattatttcagcaaaaaggaatgtagtaggagagcagggtgataataaggagaaggtcaatgaaaaacatgtgagcaaaagaatctatatcataattaagttcaagggaaagtactatgcctggacgtgcactcaggccagatttatgtttctctccacccaaacatctcagtggagtaaagaataacaaggcagtattactgcaaacatgtctcacctcccgccacagggcagcttttctcctatctcagagttgaacaaatgtacaattgggttttacaccgagacattcagttctgaggggcaagcaggagacagtggccttcctccatctcgactgcaagaggctttcctcttttactaatccacctcagcacagaccctttatgggtgttgggctgggggacagtcaggtccttctcatcccatgaggccatatttcagactatcacatggggagaaaccttggacaataccccgctttcaagggcagaggtccctgcggctttccacagtgtattgtgcccctggtttattgagactagagaatggcaatgacctttaccaagtatactgcttgtaaatattttgttaacaaggcacatcctgcacagccctaggtcccttaaaccttgatttcatacaacacatgtttttgtgagctccaagttgggtcaaagtggctgggtcaaagtggctggggcaaagctacaaattaacaacatctcagcaaagccattgttcaaagtacaggtctttttcaaaatggagtctcttatgtctttcctttctacatggacacagtgacagtctgatctctctttcctttccctacatatattcatggaccacagtcttcaaggagtccatttcctcactgtttttggtttgatttctctgaaattaggaaatgccccattgaggcacccaggattgtctttacttcccccagagcttccactcctgaggcaggagcttctcaaacaccccccaagactcaacacctaatttcaccctctgaaaccttcccatttcttaaatccaggcagggtcatggtccttagcccctcagatgctgtggagaccttctttccctttcatacattctctcaagattaaaagccacccctcctcagcacacaccccagagactcaccccaacatgcattgcaaatcaccctggaaacagtcataagaccacactcatttaataatattttatttatcaaaagacactctttctcaggtaagtgaagttctggagaggaaaagaggagtcctgatgtaaattgccctgcaggccttgctgagatcacaaggagattgttactgcagcttgtagcacaatagtaaatttcttctctggatggaagttcaacaatccagatcgtagtatattccttttcattatgctcagtccagcaaatgtgatgataacaaattccttttcatgatcatccattcagcagagaaaatgtttgtaaatgtgttttcatgaagatgtttaccataacatacaggatttaccattatcaatgcatccacaaactctgctgttgttttttatacataattttttccatcgagaagtgatagttgtacatattcatgctgttcatatttcaaccacaaactctgctggtttttttatacgtaattttttccattgagaagtgatacttgtacatatttgtgctgttcatatttcatgtttcatcatccttttacaataaataggttatattgtattttaagtttttctaactgtagtgcagaaattgtactgggtgtatacatagatatcaaaccaaatttacttgttctggctgataatgcatcatttatttcatagattatgtatttctttgacacatttcacgtacaactaattgcataaaaatgaattttcttttagtatagacatcagcatgtgcttaattcggaatttaattgttgagttaaacatcgtcattgccttttccgttgttattaattgctctggtgggaattttgttatctcatacataagacagtgtgccacaatatctcttaaaatttcaatggcaataaactttatatttaaaaacagggaatctatggaaaacacatttttttctaaaggattaaaatatttttttaaaataattttctaaaaagttaggcacggtagcaaacgtctagagtcccagctactcaggaggctgagacaggaggattgcttaagcctacgagttgggggctgcagtgaactgtgattgcaccactacattccagccagggcaatagaagttaaccctttttctaaaaaaaaaaaaaaaagaaagaaagaaagaaaaaaagcaacaacaccaaaacctcaccaacaaaatggtaaagaaaaaaaaaacagcaatacaatgtaagctatttgatccaaagaagtcaatgaaatttaaaacaaatgaaagggaaaaagtaatacttgagtcctgcaggactcagtccaagttctgctgtgcctccctcacggtgagccacccctttagaagtcacttgggtcataagttaacccgataggaagtgtcctggccaatgaactagggaggtggtaaatggcaccattttaaatttaaattcacggccttttcaacggatcagtagccatgttgggtaagagtgcaaatgtcagaggtgaaaagaggcagcaggaccctcccctagtgcttgggcaacagaaggtggaatcactaaggggacaagactttagcatgctcaagtacacaggacagaaaacatgctttttacaaaagctggtaaatatgaagagggaacattttcaagttcctgtaaccaagaactaccgcctgtaaccggtgaaagtgactttctatggcaaaagcgtttttgaaaaggtgaggaagttaaatatcttaatgttgggaggttcttctggtttatctggctagaccctaatggaatcccaagtgtccttatggagcggggagcagagagagagatttgagtccagacgaggaagaaggtgatgtgagtctgggtgcgggacagggggagaatgatgctatgtggggatctgggctggggaatgacttagctgcatgagcggagtgacttagactcctgaactagaagaaatctagggctcatcacctcagcagccctaaccatcaaccttatttttattacaggtcttccatcgacggactccctaaaaagccagcggcgtggaggggcgccctctattggacaaatagatcttgactactttcggccctcaaatagcctgactaggcaaataacaaataataataatttttttttaaatcatggaaaatattttaaaaaacaattaaaaagttataaatctataaaatctgcttctgtctgtgtgtctgtatatttagatgtctcatgtgtacataatgtttcactaccaaaatatatgatgaaaccctcattaatcggcttagaaaactaaacacctaaatattttctcagaaaatacaaaaactttaactcaaatcccttttaattcacctgactttaaaaatctttaaaaaataaagcatgctttaaaattattagtaaagtaaaattagaacatcttcagaatttagacatttggtttaaattatacaggtcaaatactgcccttagtaaatattttcaggtcataaacaactcctgtaatcttttaaataattgaattacatgtctgttttagagctttaagttctagctaaagcctggggacaaatgaagggcaccatgccccctctctgtgctggaaagagacattttctacagctctgacccttgcagtaggctttgcaactgctacctatcaaaattgcctacatcctaagtttattattaaaaggagttgcttggagttaacattataatgaatatatgtaactaaaactatttctcatacaaagtatatgaaaaagtagaatgtatttttaataaaaagttataaaaagacatgaacatgtagtttttataaaaaacagtaattttgtctagttttgcagttctaaaaagttatgttaaattcaaaaataaaaaataacaagacaagactcaaggtttaaataagttgtaaaagatttgtaaaaattagttctataaaaattttacaaaaaaaagcattggttaaaatttaaggaattattttgtttttacagaaattaaacattcattaaaaacactctgatacaaggccttaatttgggttcatgtatcagaatagcagggttttcttagaatattaatctattctttaaaagaactatgaatgttatgcaaactttataaaaatcttaccttagagtcaaactgattaaaattccatagattttacgtaaaattttattaaaaattaacttcaacaaaaataaaatttgattttctcctttaaacaaaagttttgcgtaatattaaataataaagcatttttgtttaccttttaaactataaacacacacacacatacacatacaccaacactaaagtcagctgacctcatactgtctttattggatattcttgtttaaaaaactatcttctttggaaaataaagttttttattttaaaccatattttaaattatcattttgactaaatccataacatacagtgatctgtaataattctattttataatatcaagtgttttgaagaactccaggaacagccatgagagaacactgtggtttagtaacactttatttcctcagtttgaaaatagttgtctttcttggggaggccggtttcagcagatgaaaacaagagtcatgatgaaaattacccagcagtggttagtgtgaccataggaacattgtcatcaggtcagcagaaaacatatcagcaaatttttctcatactggcagtgtgtaggggtggatgtttacagttcctgaagccccagtggtcgtgtggtcttttagttttgccatttataggcaacttgtggtaactagctcaattagacacattccttatcacaaggacagagggctttctgtatcctagggttcttgccttggcattccagaagaatcaggtcacacgtggacgtggagaatgagtgcaaggttttattgagtggaagtagctctcagcagatgggggagccagaaaggagattggtttctccctggattggggccgttcagcagccctggctctcctctgactgccccaggcaaaatccacatcgttctataagtcggtgccctgctggtgtgctggtgcctgttgtcatgttcctcttcatgtccagccgcctgtgtgttcctccgctgatgtgctcctctcgacgtcaagcctcctgtgtgtctgactgctagggtcttggggtttttataagcacaggatgggtcttagcaggccaggatgatcttgggaaagacaacattcggtcaggaaaacaaaaatgcctgttgtcatctaggtccgtggggacaagcccaggtgtggagcttttagccagggaccacagcctcctgtatccaacacttcccttcaccttttctatatcattcaaagggatcatgcccttcccatcccagcacttcactttcatgtcatttgccccctctgaagaggtacatctaactgccattagaatatggatgatgaccagtcttagctgcttcctgctgaaagggggcattgttttgggggaaaacggcagtcagattcctcccaggggtctctataataaaagatcgaggtggctactttcaggaggtcctctaatgtactatctggtcccaagtcccatttctgcaacctcctcctgatgtcaggagctgcctgagtaataattttatcctttaggattatctgtccctcgattgaattaggagatagagaggtgtgatttaccaaggcctctcttagcctctccaggaaggcagtgggattttcatcaaatccctggttaattatggacaacttagtataattgagaggcttggtcttagacctacgtaagccctctattatgcacacctgaaagtgtctcctcttccagtcttccatctcattattgggatcccatttagggtccttcactggtgctacttctcttccagttggataatattcgctcccttccctgatgctataggtgatgcaaagctcatccccaaatctctctgctgctggcagagcagcctgcttctcagtgtctatcaggttctgactcaaaagtaacataacgtctctccaggagagttcaaatgttagggtgaaattctggaaagcttctatatatctatcagggtcatctgaacacttgcccagatctcccttaatttgctttaagtcttgtagggaaaagaggacttggaccttactgggcccaaattcactgggcatctgtaggaggggcaagagtgagactgggcttgtttgggatgaagatttctaggaggggccaggtgagaggctgaagctggatacggaggttggggtggacccagaggagcagggcttgagggagctggcacgtcagctgggggtgcgtctgggactcgtgtctttaattccctgggcttgaccctggcagccttccccgagacagcaaacaggagggctggaacaatcctacatgtcagcaaaggtctggattgctttgcaaggtatagaaagcctgcacatttggggcctcagaccatgtgtcctcacatccagagaaaagttctaattgcaggatggtattgaaatgaatggtcccttcctgaagccaagccagtccttcctgtaaaccataatttggccaaacctatgtgcggagggctatgagatgcttttcctctggattctgagggtcaaaacagtcccaatggttcaggatacactcaaggggagtacaagctgggggtggtgaggagaactggctgcccattctgaaagacagggaatagaggtgttcctcatttcccttccttcttttggcaaaaagctcagggtgtgatggggagggaaagcaagcatcttcacttcactttccacctcttacccctgcgccctggcaaccttggcaggtgccggccacaggtacaaatgcggtatgtacccatgaagcagggagaacctggagattaggaattaactgccctcacctatgtttccttttctccctgctgttgaaaaactttgagttccctgggcctttttatcccatgaggcatggcctccttctgtgggatggggttcagtcagcaggaattggtcctgtccatttacattgtgcctgttgcctggctttgaattcctcagacctgctttctctttctagggcctcagcctgaagcttggaattgagtttgggactgaaaaagcatttcagaggctgtttatatccatttagtgcctcaaataagccctgctgaatttgcaattatcagccagcaggggtcactcctctgttaacttccctattagaaacagagcggtggggattctcacttagaaaagaaaaaaagagaaaaacagttaaagaggcaaaaagtggggaatgctgggggaagaaccccttgcttagtgcaagtgggcccctctaatccttataactttcccatccttcccccagttcagaccaggttgaattccttggccatggaaggaaaggttccattgatgcagtgggtgagaagcactctgtagggtcctggctaccatcggttttctcacacccccctcatcccaggcagtggagggagacacttctgcgacattgctccccctgccccttcatggctattgggtgtggcctttgcctgctgcaggcatgcctaggtgctggagctgggagggaaaagggtaaggagaggtgccctggaagccgctcatgcctggggctgtcaaggtggaggcatacatggcacctctaggaaaaattggtctgatttgcacctttggcggctgagccaaatgctcattttacttagtaacattgcctcagcctgtagcaaaactcttaacattataaaggaagagataagatccatttcaaataatgtgtgagagagaaaagagatgaaaggaaaacagagtcttttacctgcaggaaagggagagaagtggcagagttttggaagaaaggcaggcccaacagtttcccattcactcacactcaccttccgagatcccagacgagccaccagttgaaatgggaaaagtttccttgtccccctcacaggaggtggagtgggggtgtggcttgcttctttagtactccgctgctcaaacctctagggaagcatacagactggcaagttgtggggctacaaccccatggcagcatctaggggtagatgtttacagctgctgaagccccagtggacatgtggtaccatgtgctcttttagttttgccatctataggtggctttgtggtaaccagctcaattagacccattccttaacccaaagacagagggctttctgtatcccgcggttgttacctaggtgtaccagaaaaatcaaatcacacgtggtcttggagaatgagtgcaaggttttattgagtggaagtagctctcagcagatgggggagccaaaagggagaatagttttcccctgaagtcgggttattcagcggcccaggctctcctctggctgccccagccaaactctatgtcaatccattggtcggtggcctgccagagtgctggtgcctgttggtggattcctctcagcgtcgagagtttttccctctcaggaaagggagagaagtggcagccacccatgtgttcttgcactgatgtgctcctctcgacgtccaacctcctgtgtgtctgcctgctagggtcccagagtttttttaggcacaggatagggcatggtgggccagggtgatcttgggaaatgcaacatttggtcaggaaaacaaaaatgcctgtcctcatctaggtccaggggcacaagcccaggtttggagccctagccagggaccccggcctcctctacccatcactttccttcaccttttctgtatcattcaaagggaccatgcccttcccttcccagcacttctcttctgtatcaataggtgatgtttttaaaatttcccaactctagtgcaggcatggtactagacatatacatagaaataaaaccacacttattcttctggctggcaagacatagtatttttgccaaattatgtgttgttttgaagcattttatgtacccctggtcatataaaaataaagctattttgttcagtacaaacagcagcattttctggattagaaagttaatcatcttaaaagatcatcacggatttttccattgcactcatcactaattgctttggcaaaaaatttcttatctcacgcatgacaaaatcagccgcagtatctcctagtaatttaatggtgatgatctttataaaggaaataagcacatcaagggaaaacataattttttttaaaaaaagagtaataaaactttttaaaagtcttttttaaaagactgcttttctaaaatagtaaaataaaactccaccaataaaaccaccaacaaaacagaaaagaaaaaataatgatatgatcggagctatttgatgaaagatggtaaattaaatttaaaatgattagaagagaaaaagcaatacctgtctcccgtaggtctcagtccaggttctgctatgcctttctcctggtgagccacctatttaagagtcgcttaaagcatatgttaatccaacaacagcagattaaaaaccaatgcaatctgaactatttgatctaaaaacataaataaaatttaaaacaaataaaagagaaaaagcagtacctgtgtcctgtaggtctcagtccaagatctgctctgactcccttgtggtgagttagccctttagaagtcacttggggtggggcatatgttaattccactaacattggttctggccaatgagtcaggaaggtggtaaatggcaccttttcttcttgctgatttctttcagttcctttggagtctggacattagtcctttgtcagatgcctagtttgtgactactgtttcctatactgtgggttgtgtgtttaccctgctgatatttcttctgccttgcagaagattttcggtttcattaggtcctattgatcttattctatttttatatttttgcgtttgcttttggggcattagtcatgactacttggcctaagccaatgtctagaaaagctttttggatgctatcttgtagcatttttagactttcaggtcttagatggaagtttttatatgctttgttaaagatcaggtgactgaaagtaccgggctttgtttctcggttctctattctgttccattgctctatgtgcctatttttatacttcctgcaccatttattgaataaagtgtcctttccccaattagtgtttttgcatactttgttgaagattagttgtctgtaagcatttggctttatttctgggttctctattctgttccattgctctatgtgcctatttttatacttcctgcaccatttattgaataaagtatcctttccccaattaatgtttttgtgtactttgttgaagattagttgtctgtaagcatttggctttatttctgggttctctattctgttctattgctctatgtgcatattttataccagtatcatgctattttggtgattgtagccttgtagtataatttaaagcctgccttcagatttgttctttttgcaaagtattgctttggatatgcggtcacgtttttggttttgtataaattttaggattcttttttctagttctgggaaggagaatgatgatattttgatgagaattctactgctctgtagatggctttggagagtatggtcactttcacaatattgattctacctattcataagcttataatgtgttcccatttgtttgtgtcaactgtgatttctttcagcactattttgtagttttccttgtaggaaacttacattaacctacttggttaagtatatttctaagtattttacttattaaaaattctcagggaaatgcaaagtaaaactgaggtgggaaattaaagaaaaataaaattaaaaagaaagggaaataagctttcttgtattaagctaacttgtcccagaggcagcaacaggcacagcccagacccaggaaaagtcttgataatattatttattgtattctggagactcttccagcactccttcaatgtagggagaagaaaaacaaattttcctttgttttatggtatgagtttatagattcttgttctctttaactagtaacttcaagtattctgttttatctaagaagtatggcaaaggtcatgagaagcctgagcaggcctgaactacagctctctaggcaccatagtgaagataaaccaatgcaagcctctttagagcaaaacctagataatagacatctgggttgcatagcaacagttatgtgcaatcctgagttatgaacctgttacaatttgattaactgtctttttcctgcctctgtatccctgctttcacaccactgtaagcttgcttcaagctggcccacccccttttgtgaagtgtgtataaaagtcaagtgctgtctttgttccaggccctgtctttggacgtgagtctgctgggcctgagagcactcaataaaagattctcctgttttaacccaaagcctctctctcatcctcctaaatcccacaacaaaaccacaatgagatgctatcttaatcttgctagaagcccataatttaaaagtcagaaaacaatagatgttggcatagatgtggtcaaaagggagcactttgacactgctagtgggaatttaaactagtccgaccactatggtaaacagtatggggattccttaaagaactaaaagtagaccattcattccagcaatcccattactggctatctacccaaaggaaaagaagttattccataaaaaagacacaagaatatggatgtttatagcagccgattcgcaattgcagtgatatgggaccaacttaagtgcccatcaacgaacgagtggataaagcaaatgtggtacaccatggaataatacttgataataaaaaggaacaaaataatgtcctttgcaacaagttggatggaactggaagccattattctaagtgaagtaactgaggaatggcaaatcaaatattgaatgttttcacttttaaatgagagttaagctatgagaatgcaaaggcataagaatgatataatggacttggggactcagggggaaaggttgggagggggatgaggaataaatgatgacatattgggtatattatacactgctcaggagacagatgcctcaaaatctcagaaattaccactaaggaacttttatccacataaccaaaaaccacatatattccacacactattgaaagaaacataaacattattttaaaaaataaagccacttttaaaattagcaaaataaaataaatatgtcttcagagtttagatattggatccaaattagacagatcaaatactgcctttactaaatattttcatgtcattaacaacttctaaaacctttcaaacagttttttgacatgtcttggaaccatccatttctagctaaggcctgggcacctgtgaaatagggccatgcccccccttatactgggaagagtaagatatttcaagactaagatgttttctacagctccatctttttctttaagctctacatcaaggacataattaaaattggttgtctcctaagtggtttactaaaaatgcatacttaagagttaccattataattaatatttgtatctaaagctacttaaaaattttcacacacaaatctgactgaacaagtaaaatatattttaagtcaaagtttataaaaggacatgagaacatagcttttatgaaaaaattagttttgtcaagtttagaggttttcaaatattttaaattcaggaaataaaataacaaaaagacaaaagaaaatggttgaacaacttagaaaaggtttgttaaaattcatcttataaaacaatctacatgtaaaaagtgggctaaaatttgaaagagattatttaggttttccataaattaatccagaaggggtaggaagtcttaagaatgaggaaggacaggaggaaggggaggtcatcctgacactgcagaggcagaagtgcagctgaaggtatgaaggctaagaggggaggggagtttgagtgctgctgcctggctgtcagagcagaggagggtcctgggcaccagacttgaggaagggatgaaaatgctgggcagacctgtagtgggcccttgagatggcagatagtggtttccagagagagggccattgttttccagtgcccagcactgagcagagagagttttgggcagtgtaaaaaaaaaaagagaacttacctctttctcgttttagaaaaagaacagtctaagaatatcagcagggaaactctcagtgcttcaaggggttaaacgcccttttggctttcttgtgttggtttcatcatagaggaggagaaacttcttggaagtgttcctaaaaacacaacacgtctgcttctcctttcaaaaaaggaagtgctaaaacacgaacactctagatccaaatattaatacggatgtctaaatgcttccgttttccaaggggcagaaagctaaaggttgtaacctattcatttcagtcaaagttggtgaaagggaagcaaaggaactgggtggggcttggaaggatgacgaagctcaagctcattggccagcaacctctctcctgggggcgggaggggtgagcatacgtcattgctttggcttctataaaatgaggaggactcaccgagtgtgaagagtccttctggtgattgcagctgagagcacactcacgacgttctgcaaggattctctgattatgattctgaagggaaaagcgatggaatggacagcagagattgtaattttctttatcttgaattacggaagaaagtatctaggacagaaatccacgacaagtccttggaaccagcagatctcttcgttcacggagacgttgacgtattctctattgaagaagattcttaccttcttactggacaaggttttgtcagttctgcgtgactggattgtccgggagactctgaggaaactgatgtcacatgtttttccaaagaagatgtttctggaaccaacaactgtgattgtggtttgaggacttctgagagttccagtacaggaaataagcagaacatcagctggaggctaaacggatccagacttcactcttcacttcccttcctattcagtctattgtgcctgctgactgagaagcttggctggtatgtgagcaaataaacggaactattcagaaggagatgttgacatattctgtattgaagaagatccttatcttctcacctgacaaggttttgtcagttctgtgtgactggattgtccggaagactctgaggaaactgatgtcacatgtttttccaaagaagatgtttctggaaccaacaactgtgattgtggtttgaggacgcctgggagttccggtatgcgaaataagcagaacatcagctggcggctgaagggatgcagcctccactcttcacttcccttgccattccatctattgtgtctgcctgactgagaagcttggctggtatgtgaggaaataaacggaattataaacaaggagattgtttctcatctacttcattctgttgtggcttttctattttggggttcagggtgtgtgacaaggaccaaggagatgaaaggtttcatgatggagaaagcccaggcaatcagattgaagagctatccacagggaatcttggctgctgaggggctgcaccctgcaacggactgaccatatgacagaaaagggttttaaaggctcaacttctggactgagaacccagagtaatttgggaacctcctctgtgaggagatatgaaagctgggaatcatgacatccctaggaatggaaggcacatttcctgatggaaggggtgctttggaaaacaggagcagagtagacacagcagccttgtggatacgggtgggcagcatgcatgggtgatgtgaacgtggagtgtttgtgatcgaaactcaaaatgtctgacaaagtgaaaacctagaaaccacaatgaggaggaagagtttgtgagggcaatcactctccccatgtgtgaaaatcgggggctcttaaaatctcatctggagaggtgcagtctaccaaactctgggactttagcctccccttttaaaaaaccgtgcatcaataccaacgtccgaaaccacagaaataacacctggcttgcatggagacaaggacaaaaagccgtcatgatgagttgttctgctcacttgctgcctctgttcagtgcacaggatattgtccacccactagcaggctactgcaagagaagtgtgcaatatgttccctatgtgccatatatgtgccatatggcccatatgacaactgagtcagaaaatatctgatgccctcagagttacactccacctggagcttgcccccagccatccaggacctaggctccctaccctgtccaattttctggtgttttgggggcttcattctctaaggtgtgcccactctttactcaaaccaaaacacccacatattcctgcccatgaacaaccaatcaaccacttctcagttccacatcctgctgttgggtctctagtggtgacactgtaactcccaggtcatagtggtgacactataacacctagctaaattgatgccttgtctctaggaggccatgggctcctgcaggtctcatctgactctctgtagccttccctgacaatgctcacaatacccaagccagagccacattgacagcaagctgctctcatcttacctttgccagacctggccactggaaaaggctgaccctcatcctgcaatgcctatacctccaacctttgtctcaagctggtgtcctggagggacttctaagcagaaaacagattcagactcccatcctctcctgaatggcctcatatccaattctcagaccctcagccttcattgtaaggacacttcatccatgcccttgagtattctgtctgcactgtgtattctgcaatagattctcctccctctgcgaccctcaactccttccgcagactttttgttttcttgatcatctaccatagtcttccactgggacactgccaagcccattctggagagtgagttgtgcaagtacactgccccccatctacctttcgggaggtgtatacacccttctttctcccaggtctggaggctttctattttcatcctgaggcatctccacctgctcttggattcttcaaattgacaaccaccagttaacaagaactatgtgtcaccaaatagccaaacaatggcaattacaaaaataaaattaatagctgtaacccccattagcaaggatacacaaatcaaatcagggatagtgggtgaggaagtctgcctaacattcaaggaaggattctgaagtgatacaaaatcattgcctttgctatctttagaatggacactttcagccaggcacagttgctcagcctgtaatcccagcactctgagagccccagttgggtggatcacttgaggccagcagcttgagaccaccctgggcaatgtgcagaaaccccaactctactaaaaatacaaaaatagccagttattgtggcacatgcctgtaatcccaactccttgggaggctgaggcacaagaatcacttgaatctgggagccagagtttgtaatgagcgaagatcatgccactgcactctagcctaggcattagagtgataatctgtctgtggaaaataaaaacattcctcttcaaagttttcttctttaaatcataaatgttggaattaatatatcctctttgaaactcactttcttcaagcttctttatttgatggtagtaaatctttgttaagctttatgaggcaagagtaatggaagaagcatattatatatatttatactctaacctcagtgcttgttctagcaagctcaggcatgcgtgaatgtgcccaggcatgttccagcccataccttatatcctttccttattgggaaatgctgttactcctataagcattcttgtaagcaacttcctctttttctttgtctccactatctttacctattgaggacagttttaggttcttagccagttggatgtagcatagactgtgaggtccaaccccagccaatggagatagcacacagcagtagcgacctcatgcttaacagataaatattcctgtctccctttgtttggggtgctctcagctgatgagcaacaccctttctaaagaaattaaagttgtcttgctgagaaaacttttggtctaaatgctgattcttccttgcagcactgaagaagaagcaattatttccaacactttctcatacacaaaaaaagaagaaggtggaagaaaactttcttgtgcaccctatccctcactcagaaagacaacagaaggctcctagtggcaagccctagaggattcatttcttttgggaaccctcttggctgggatactaggactcaggtcaaactcagcattttcagtgtgtgggaagtgtgcttgggtttcactgttacttccaataatgtgatttggtccttggggttcaccaaattttggtatggagtggtgaaccctgttaagtttaagtgtctataaaattaacaaagcaaaataaccattctgccccatggttcagagaccaaatattgtgtaggaaatgctttagcgagagaaacagagaagaataaaaaatgtcctcaagcgctgcattatttcttgttatcgtccagatcttagaggaaaggctttcattttccctcattcagtatgatattagctgtgcatctgtcatttatggcttttattatgttggggtatgttccctgtgtatgtagttttttcagggtttttgttatgaagtgatgttgaactttatcaaacgtttttcagtttcagttgaaacgatcatatgctttttgtccttcattctcttgatatgatgcatcatgttgatgatttccatatggtgcactgtccttgcatcctgggcatgaattccacttgatcatgacaaatgaatttttaatgcattcttgaattccgtttgctggtattttgttgaggatttttgcatcaatattcatcagagatattggcctgcagtttctttttttttcttttttctttgttttgttgtttgtttgtttgtttgttttgatgtgtctatgtctggttttggtatctgggtagtagtgttccatccccttttattttttagaataatttgaataagactggtgttggttctttaaatatttggtagaattccgaagtgaagtcattgggccccgggcttttctttagtggaaggctgtttattatggcttcaatctcgttacttattattggtctattcatgttttgaatttgttccttatttaatcttggtaggctgtgtgtatctaggaatttgtccatttcttttagattttcaaatttattggcacataattgcccattgtagcctctaatcgtcatttgagttcctgcagtaccaattataatgtctccttcttcatttttgattgtatttatttggatcctgcccctttttttcttacttaggctgcctaataatttcttaattttgttgaactttttcttttgtttgtctcgctctgccaccaggctggagtgtagtggtgtgatcttggctcactggaacctccgtctcccaggttcaagcaattctcctgcctcaccctcccaaatagctgggactacaggcaagtgccaccactcccagctaatttttgtatttttagtagacacgggttttcaccatgttggccaggatggtctcgatctcttgacttcataatccacctgcctcagcctcccaaagtgctgggattacaggcatgagccactgcgcccagcctaattttgtttaaattttcaagaaatcaacttcttctttcattgatttctgtattttttatttccattttatttatttaaactctaagctttattctatcttcttctcattttagctttggtatgcttattgcctctctagctctttaatgtgcattgttagattgtttatttgaagttcttcctctctacaccataagacgtaagcatgtcctcattatgtcataagatgtaaccacttacagctataaacttccttcttagttctgcttttgctgtatctcataggctttgttatgttgtgtttccattatcaattgtgtcagaaatttttcaatatttttcttaatttcttcattgagcaactgatcatttgggagcatatttttaaacttccatgtacttacatagtttccaaaatacctcttgtgatcaatttctagttttattccactatggttcaagaagatgcttgatattatttcaattttttttcacattttaagatgtgttttgtgacctaacatatggtctactttttttttttattaaactttaagttgtggggtacatgtgtagaccgtgcagttttgttacataggtatacacgtgccatggtggtttgctgctcccattaacctgtcatctacattaggtacttctcataatgctatccctcccctaacctccaccctctgacaggacctggtgtgtgatgttcccctccctgtgtccatgtgatctatttttgagaatgatccatgtggattagaatgctgtggaaaagactttggattcctaatatccagggagggagacgatgatattactttcaatatcacacgggtgtacacactctctgtgacattgttcctaatatccagtggaagagaggatgatataacacccagggagggagaggatgatattactcttaatattgcagggtgtgtacccatgcctatgatattgttcctaatatcaggagggggagaggatgatattactcagaatatggcagggggtgtacacacactctgtgacatggttcttaatatacaggggagaatgggacaatattactctcaatatcgcagggggcgtacaaccctgtgatttgttcctaatatacaaaaggggacagtatgatattgttcctaaaatcgcagaaggtgtacaacgccctgtgatattgttcctaatatccagggcgggagaggatgatattacccccaatatcacagggggtgtgcactttccctgttacattgttcctatgatccgagtggggggaaatgacattagtcccaatatcgcaggatgtgtacactactcccccatgatattgttcctaatatcaagggggagagaggaggatattactcccaatatcgcaagggaggtacatcctccatgcaatattgttcgtaatattcaggaggagagaggaagatattactctcaatatcgcagaaagtggacacccaccctgtgatgttcttcataatatccagggaagcagacgattatatgactttcaatatcgctgggagtgtacatcccttttgggatattgtttctaatatccaggaagggagaggattatattacttccagtattgcagccagtgtacacatttcttgtgatattgttcctaatatccagaaagggaaaggatgatattactcccaatattgcaggtggtgtacacccccctctgatattgttccttacatcaaggaaaagaaagaagaatattactcccaatatcgaagagagtgtacacccctcctgtgatattgtatttaatatccatggggaaagaggatgttgttactcccaatatcgcagggggtttacacccacactgtgatattgttcctaaaatccagtgaaggagaaaataatattgctcccaatattgcagggtgtatacaggccctcccccgttatattgctcctaatatccagcggtggagaggatattactttcaatttttgcagggagtgtgtaccccctctctgatatttttctaatatcaaggatgggaaaggatgccattactcccaatatcgcaggaggtgtacatgccctgtgatattgttcctaatatccagggaggtagaggatgatattactttcaatattgcaggggctgtacaccctctatgatgttgttattaatatttaggttgggagaaaatgatatttttcctaatatcctgggaaggaaaggatgatattactgtaaatattccagggagtgtacaccttcctaatattctaatattgttcctaatatccaggggtgggagaggattatattactcccaatatcgcagtgggtgtacacccctcctgtgatgttgtttctaatatccaagcgaggagaaaatgatatcactctcaataccgcagggggtgtacaccttccccatcatatcgttcctaatattcagagggaaagaagatgatgttactttcaatatcgcaggggttgtacacaacccctgtgatatttctcctaatatccaggaagaaagaggatgatattgctcccattatagcagacggtatacgcctccctgtaacattgtttctaatatcaagactgggagaggatgatatcacttccagtatcgcaaggggtgtacacctcccccgtgatattgttactaatatccagggggaagaggataatattactttcaatattgcaggggctgtacacccccgtgatattgttgttaatatttaggttgggagaaaatgatattagtccaaatatcgcagagagtgtacacacttccgataatattgttcttaatatccatgggggagacgatgatattacacccaatatcgcagggggtgtagtctccccttgtgatattgtccctaatattcagggaagtaaacgatgatgttagtgtgaatattccagggagtgtacaccccctttgtgatattgtcctaatatccgcaggagagaagataatattactcccaatatcgcagggggtgaacacaccccctgtgatattgtttctaatatccaagcgaggagaaaataatattactcccaatgtctcaggggatatacaccttccctatgatattgtttctaatattcaggtggaaaacgggtgatattactcctaatatccaggaagaaaggggattatgttactccccttatagcagggggtatacacctcccctgtaatattgttcctaatatcaaggctgggatatacgtggggggaaggatgatattactcccaatatcacaggggttataaaaccttctgtgatattgctcctaataaccatggcggaagaagatgatattactcctaatattgcaggaggtgtacactcccccattatgttgttcctagtatgcagaaaaggagaggatgacattattgccaatatcgcagggtgtgtacaccacccatgatattgttcctaatatttagagggacagaggatgatattactcccaatatcgcagggggtgtacacgcatcccctgtgatattgttcttgaaatcgaggggaaagagaattatatttctctaaatattgcagagggtgtacaccgccccctgtgatattgttcctaatagccgggggcggggggagataattaaattactttcaatatctcagagagtgtacatcccccttgtgacattgttcctaatatccagagcaaaagagaatgatattcctcccagtatcgcaggaagtgtacatttaacctgtaatattgtttctaatatccagggggaagagaatagtaatactcccaatatcgtaggggttgtacaccttttctgtgatattgttgcaaatatttagaagagagagagaatattactcgcaatatcacagggaatgtatacttcccctgtgatattgttctaatatctagaaaaagagaggataatattactcctaatattgcagggggtgtacacccccacttgtgatattgttcctaatataaaggaaggtcgaaaaacaaacggggagcccagggggaaggaaggcaggcgaggaagaggcagcgccggggcgccggagggagcagccgggccgcggaagcgcgagcacgagaccggtcgcggtcgcagtcgcatttttgccgttgtcgcggccgccgccgccgaggcttacccggggatgtctgagcccgcgcctcgcggcccccaagctccacgctgcgcccgctgtcccggcctctaagggccgccacgtccctgcggcgcgcgcaggcagaaagcggcttcgtgccggcggagggggcccgggcgggccgggaaaggctgccccaggccccgcgcctaccccatcaccgcggccggcgccgggccgggaggatgagcggtgtggggctctgaagcatggagggggttttgtacaagtggaccaactatctcacaggttggcagcctcgttggtttgttttagataatggaatcttatcctattatgattcacaagatgatgtttgcaaagggagcaaaggaagcataaagatggcagtttgtgaaattaaaggtgacagctttggaggggaccacccttgattggatacataaattctgttcattcagcagacaacacaagaatggaattaatcattcctggagagcagcatttctacatgaaggcagtgaacgcagctgaaagacagaggtggctggtcgctctggggagctccaaagcatgtttgactgatacaaggactaaaaacgaaaaagaaagaagtgaaaccagtgaatcgctgaaaaccaaaatgtctgaacttcgcctctactgtgacctcttaatgcagcaagttcatacgatacaggaatttgttcaccacgatgagaatcattcatctcctagtgcagagaacatcaatgaagcctcttctctgcttagtgccacgtgtaacacgttcatcacaacgcttgaggaatgtgtgaagatagccaatgccaggtttaaacctgagatgtttcaacggcaccatccggatcccttagtttctcctgtgtcaccttctcctgttcaaatgaggaagcgttctgtcagccaccctggttcttgcaccagggaggagtagccactgtataaaagaaccagtatctgcacttcaccgactctcccagcgacgccgaagaacctactcagatacagattcttgtagtgatattcctcttgaagacccagatagacctgttcactgttcaaaaaatacacttaatggagatttggcatcagcaaccattcctgaagaaagcagacttatggccaaaaaacaatctgaatcagaagatactcttccatccttctcttcctgaagaaactgtagtgtccaactttctctaagtattgctatgcaaaagctgctgtaattgaactattgttatagggagtagttttttcccttaggactctgcactttatagaatattgtaaaacagacaaacaagaaaacaaaccacatacttttgaagcgtgttttatctttatatagtttgtttgcaagagtattttcctaataacttcacagtatgaatgtgcatcttttttttctttttttaacaaatgatggtgtaacattttgacatccataaggacaaatgtagatatttttctaaaaaaccgtgaggggactgacagcttggtcagggtgtattgtagcttataaacatgaaatcttacaaggtttcagtttgacagaagtgtgatatatgtaacttgtgccatggaccaaatggtcactttaccacagctaaaaatgagttatgatagcagcttgatggtgattgcattgtattcctttaatcaaaaaggaaacgcaatattctaagtatctttagcccaaataccatgacatattgagcatctttaaataaccagactgtattgtccttcatatgtgaagttgacactactgatttgtcaataccaaattttgggttaaagtgtttaatttttatttatttattttcttgttgcctcaaaagatgattgcattctaacttttgtgacctaccaaatttaagatgtgtatacattgttctttacgttgttctagaaaagagattttaatgctgtagtgacttagctcacttacatcagagaaataaacaactttcaatggaaaaaaatatatataaaggaaggaagaggatgatattacttctcatatagaaggggttgtacaccccccttgtgatattgttcctaatattcagggagggagaggattatattactcccaatatagcagggagtgtacacccccccccccgtgataatgttcctaatattcagggaagcagaggatgatattactttcaatatcacagggggtgtgctgtccccctgttatattgttcttaatattcaggggggagaggatattattatgcccgatatcacaggagaagtacaccccacaagtgatattgttcctaatatccaggggtaaagaggatgatatcgcaggtggtgtacacccctccccgtgatattgtttctaatataaagaaggagagagcatgatattactcccaatatcgctggaggtctacaccccccttgtgatactgttcctaatatccaggaagggaaacaatgatattgctgtgaatattccagggggtgtacacccctttgtaatattgttcctcatatccagggggtagagaggatgatattactcccaatatcgcagggggtgcacggccccactgtgatattgtttttcatatccaggaggggagaggatgacattactctcaatatggcagggggcgaacaccccctgtgatattgtgctagttaggttgggagaaaatgatattactcccaatatcgcagggggtgtacaccgctcctgtgatattgttcctaatatccatgacgggagaggatattactcccaatatcgcagggggtgtacctctcccctgtgggattgttcacagtatccaaaagggaagaggatgatgttactcccaatatcacagggagtgtacaccaccattgtgatattgttcctaatagccagggaagaaaacgatgatattattgtgaatattacagggggtgtacacaccccctgtgatatggtttttaatatacaggttggaaaaggatgatattactcccaatatcacaaaaggtgtacacacccccccatgatattgttcttaatacttcggtggggagaaaatgatattagtctccatatcacaggggtgtgaactcctccggtgatattgtttttaatatcaagaggggaggagatgatattgctttcaatatcgctgggggtgtacatccctcctgtgatattgttccttatatccaggcgaggggaaaataatattactcccaatagtacacaccccatgtggtattgttcctaatactcagggggaaagaagataatattactttcaatatcacagggtttgtacacctttcctgtggtatagttttcaatatccagggggaaggtacatgatattactcccattgcagcaaggggtgtacacacctcctgtgatattgttcctaatatccagaagtggtgaggatgatattactcccagggggtgtacaccccacctatgatattgtttctaatatccaggggaaaagagtgtgatattatgcccaatatcgcagagggtgtacacttatcctgggatattgtttctagtatttggggagggaggagaggatgctattattctcaatatcgcagaaattgtacacccccgctgtgatattcttcataataatcagggaaaaagaggatgatattactaccaatattgcagggggttacacttcccctttggtagtgttcctaatatccaggaagaaagaggatgatattaatcccattttccaggaagtgtacacccaccgtgtcatgttgttcctaatatccagcagggaagaggatgatattactcccaatatcggagagggtgtacacttcccctgttatattgtttctaatacccagggggaagaaggatgacattactgccaatatcacagggtgtgtaccccaccctgctattgttcctaatattcaaaaggaaagatgaaaatattactcccaatatctcagggtgtgtacacctctcctgtgatatcgttcctaatatccacaggaagagagaatattactctcaatattgcaggggggtgtacacccccctgtgatattgttccaaatattcgggcggggagaggatgatattagtcccaatatcgcagggggtgtgcaccaacctgtgatattgttcctaatatccatgcgggggaggacgatatcactctcaatgtcgcaggaagtgtacacctctcttgttatatttttcttaatatccaggagggaaaagatgatattactgccaatatcgcagggtgtgtccaccccccttttatattgttcctaatatccaatggaaaagaggatgacattgctctccatatcccagaaggtgtacaacgcccctgtaatattgttcctaatattttgggggaagagaggatgatataacttataatatcacaggaggtgtacaccacccctatgtattgttcctaatatcctttaagggagaggatgatattactcccaatatctcaggtggtgcctattccccctgtgatattgtttttaatatccaggggaagagagtatgatattacgcccaatatcgcagggggcatacaccctctctgagatattgttcataatatatagagggagagaggatgatattacttccaatatcagaggtggggtacaccccccggttatattattcttgatatccaggaggggagaggttgatattactggatatatagcagggagtgttcacatcttctgtgatactgttcctaatatccagaaaagtagaggatgatattactcccaatatcgcagaacgtgtacacctccctgtgatattgatcctaacattcaaaggggagaggatgatattactcaaaacatcacagggcatgtacactcccctgtgatattgttcctagtatccagaagggagcaagataatattactttcaatatcgcagggggtgtacacccctctttggtatgtttcctaatatccagaaggaaagagggtgctattactttccatattgcaaggggtgtacacccccctgtggtatggttcataatatccagggagggaaagggtgctattattccccatatcgcgaggcatgtacaccctgctgcggtacggttcctaatatccagggggaaagaggatgctattacttcccatatcgcggggtgtgtacacccccgtgtggtatgttttgtaatctccgggaacgaagagggtgttattacccctcatatcgctggaaatgtacactcccctgtggtacggttcacaatatccaggggattgagggtgctattactccccatatcgcggggggagtgcacctccctgtggtatggttcgaaatatccagggtaagagagggtgctattattccccattttgcaggaggcgtacacccctctatggtatgttttgtaatatcccaggtaaggggtgctattgagagaagagagcaaaagaccccccccatattgttctgtattattttatactcagtacctgttttaagaagaaacaaggaagcgaaaccaaaggcaggcagcccggcgccaggcaccagatccaaaaccagacccgaaaccaggcctgggccttcctgaccttagcctgaaagttaaaattcaacccatgacctagcaactgatgttatccatagattccagacattgtatggaaggacattgtgaaatttcttgttctgttctgtttcactctgagtactggtgcatgcagcccttgtcacatacccactagattgctcaatcaatcatggccctttcatgtaaaaaccttagtgttgtgagcccttaaaaaggacagaaattgtgcactcaacaagcttggattttgatactctagtctgctgatgcttccagctgattaaaagccacttccttcactacctcggtgtctgtgggattttgtccgcggctcctcctgctacactgtgactccccttatagagaggggtgtacacccccctttggttcctaatatccagcgggggagtaggtgctattactccccatattgcggggagtgtacacccccttgtagtacggatcgtaaaatcaaggagggagagaaggtgtaattatccccatatcacagggagtgtacacccctttgtggtatagtttgtaatatccacgacgggagagaatgctattactccccatatcgtggagggtgtacaccgccctgtagtatggttcgtaatatccggaaggggagaggttgctattactccccatatggtgggaagtgtacacccccatgtgatatggttcataatatccaggggggtagaggatgatattacccacaatatcatagaaggtgcacacccttttgtgatattgtccataaaatccagaaggggagaggatgatattacttccaatatcacagggggtgtgtagccccatatgatattgtttgtaatatcaaggtagggagaggatgctattccttacaatagctcaaggggtgtaaccttcttgtgatattgtttgtaatatccagaaggggagaagataatttttttattttaaaagtaaactttaatgtcaaaaatgcaaacttgagaagggcagaaagatcaaacagaaggctgccacttcacaattggagggttgcacagtggccgggcagaggcgctcctcactccccagacggtgaggcagccgggcagaggtgctcctcacttccgagatgttgcaggagccgggcagaggtgctcctcacttcccagaacagggggctgccgggcagaggtgctcctcactgcccagacggtttgcaggcctggcagaggcactcctcacttcccaaacggagcagcggcaagccagaggcgctccacacttcccagatggtggggcagccgggcagaggcgatcctcacttctcagagggtagggcggcccagcagaggcgctcctcacttcccacatggtggggcggcaggctagaggcgatcctcacttcccagacggtggtgtggccatgcagaggtgctcctcacttcccagatggtgtggccgccgagctgaggcactcctcacttccctgacagtggggcggctgggcagaggcgctcctcacttcccagacacttggactccgggcagagactctcctcatttcccagatggtggggctgccgggcagaggcgctcctcacttcccagacggttcagaggccgggcagaggcgctctggggagaggataatgttactcccaatatcgcagggggtgcacactccctgtgatattgttccgaatatccagagggggaaaggatgatatagctcccaaaatcgtggggagtgtacacccccctgtgatcttgtttgtaataccaagaagaaaagagaatgctattatttccaatatagcagggggagtacaaccccctgtgatattgttcgtaatatctagggggagagaaaattatattagtcttaatatctcaggggacgttcatccccctgtaatattgttggtaatattcagaatggagaagatgatattgttcttaaaatacaggaaaaaatatgataatattacttccaatatcgaagggggtgtacactctcctgtgatattgttcccaatatccagaatgaaagaggatgctattactcccaatatcccagggagtgtacacccctttgccatattgttcataatatccaggggaagacaggataacattactcccaatatcaccgggggtgtccacccactagtgatatttattgttcatcatatccagaaaaggagaggatgatattactcccaatattgcaggtggtgtacggtccctgtgatattctttgaaatatctagaaaaggagaggatgatatcactccgagtatcacagggggtgtacacccccctgtgatattgttcgtaatatccaggggagaaaaggatgatataattgccaatatttcaggggatgtgcacctccctgtgatattgtttgtaatatccaggggtggagaggatgatattactcaaaataacgtaaacatcctgtgtgtacatcccctgtgatattgtttataatatccaggggggtagaagatgacattacccccaatatcacagagtgtacacacccctgggatactgttcataatatccaggcgggaaagaatgaactacttccaatatcgcaggatatgtacacccccctgtgatatatttcctaatatttatgtgggtaaggatattacccccaatatcacagaaggtgtacatcctctttgtgatattattcctaacatccaggaaaggagagaatgatattactcccagtatcgcagggggtgtacaccacccctgtgatattgttgctaatatccagggggagaggataatattactcccaaaatcacaggggacgtacactcctcctgagatattgttcctaatattcatggggaaaagaatgctactactccaaatacagcagagggtgtacaccatccccgtgatattgttttttatatccaaagggtgaaaggctgatattactcccaatatcgcagggggtgtacaggccccccatgatatcattcttaatatccagggaggcaaagaatgatgttactcccaatattgcaggctgtatacaccccccgtgatattgttcctaatatccagagtaagagaggatgacattgctcccaatattgcaggggttgcacgcacgccctgtgataatattactcccaatatcaacagtgggtgtacactcctcctgtgatattgtttgttatatctaagaaagaagaggatgatattactgtcaatatcacagaaggtgtacagccccttgtgatgttgtttctaatatccagcggtgagaggatggtattactcgcaatattgtagggggtgtccaacggccctgtgatattgtttctcatattcaaaaaggaaaagaataatataactccaaatatcgcagggtgtgtacacttccctgtgatattgatcctaatatccaggaagagagaggatgatattaatcccaatatcacagggggtgtacatcgcttctgtgatattcttcctaatatccagggggggaggggatgctattactcttaaaatcgcagggaacttacactcccactatgatatttttcctaatatccaggaagggagaaaatgatattactcctaatatcacatatcacaatgggtgtacatctccccgtgatattgtttctaatatcaaggatgggagaaaattatattactctcaatatcgcagggggtgtgcacacctcctgtgatattgttcctagtatccagcggaggagatgatattactttaaatattgtagaaggtgtacaacccccctttgatattgttcctaatatccagggggaaaggagatgatattactcctaatatcgcaggggctgtacaaccctatgtgatattgtttcttctaatatccaggggtggagaagataatattactcctaaaatcgaaggggacatacactccccctgtgatatttttcctaatatccagaaggaaagaggatgatattactcctaatattacaagaaatgtatacctgtcctgtgatattgttcctaatatccagaggggtaaatgattatattactcccaatatcgcaggggtgtacaccttccctgagatattgtttctaatatgcagtggaggagaggatggtattactcccaacatcacaggagatgtaaactccccttgtgatattcttcctaatgttcaggacgaaggagggtaatattactcactgtattgcagcagggggtgtagagccccctgtgatattgtttttaatattcaaggttggagaaaataatattccttccaatatcgcatggggtgtacacccttctttttatatagtttctaatatctggggggagaggatgatattactcccaatatcgcagggggattacacccccactgtgatattgtttttaatatccagggtgggagaggataatattactccaaatatcccagggctatacaccctccgtgtgatattgtttctaatatccagaggaagagaagatgatattactcccaatgtcacagggtgtgtacaggccttctttgatattgttcttaatatccatgagggagaggatgatattactcccaatatcgcaaagactgtacaccctttctgtgatattgcttccaatatccagggagggagaggatattacactcaggatcacagggggtgtacaccccaacctgtgatattgtttctaatatctagggaaaatgagggtgatattactatcaatatcacaggaggtgtacactcccttatgatattgttcctaatatccaggagaatgacaggataatattactcccaatatcgcgggtggtgtctccccccactccgtgatattgttcctaatacccagagggggagagaatcatattactcccaatatcgcaggggatgtacacctacatccggcggagtagaagataatattactcacaatatcgcaagaagtgttcaccttccctgttatattgttgctaatatccagggagtgagaagatgatattactttcaatactgagcgtgtacactacccctgtgatattgtttctcatatccagtagaggagaaaatcatgttactcccaatattgcaggggtgaacacctcctttgtgatatttttcctaatatcaggaaagggagagtatgatattacccttaatattgacaggggtgtacacccccctttgatattgttccaatatccaggggggcagaggataatattattcccaatatcgcagagggtgtacaccccccgtgatattgttcctaatatccagagaaataaaaaatagtattatttccaatatcacagggcgtacattttccctgtaattttgttcctaatatctggggggtggggtggcaggataatattactctcaatattggagagggtgtacacccccctgtgatattgttcctaatattcagggtgggagagaatgatgttactcccaatatctcaggagtcgtatacacccccttgtgatattttttctaatatccaggaggcagaggatgatattgctcccaatatcgcagggggtatacacccgagctgtgatattgtttctaatatgcaatatgggggaaggatgattttactttcaatatcgcagggaatgtacactttccttgtgattttgttcctaatatccaggggtggagaagatgctattactatattactcctcatatcgcaggcggtgtacaactccctgtgatatggttcagaatatccagagtgaaaaaggagggtgacattactcccaatatcgggggggtgtacacccctttgtgatgtggttggtaatatccaggggggcagatgagggtgatatcactccccatatcgtggaaggcgtccacttttttgtgatgtggttctttatatcccgaggggagaaggtgatattactccccatatcgcgaagggcatacacccccctgtgatatagctcataatattccggagagtggaggaagatactatgccctatatcgcgggtggcctacaaccccctatggtttggcttataatatccaggggggagagggtaatattgctccccatattgtggagacgtacagccccctgtgatatggtttgtaatatctttggggggcgagggtgatattactccccatatcgcggggagcatacacccccgtgatctggttcatagtatctcaaaggaagaagttgatgtgtacaacttaagggaaaaagttgaagtgaagtgtacacacgccctgtgacgtggttcataatatccaggcgggggagaggagagtgatatttactccccatatcgcgggtgttgtaaactcccctgtgatatagttcataatatccaggggagagaggagggtgatattgctcctcatatcgcgaagggtgtacaaccccctgtgatatggttcataatatccagaagggtagaggacgatgatattactccacatatcttgggaggtgtgatatggttcgtaatatccagcgatgagagaatgatattactccccatatcgcaaaaggtgtgatagggtttgtaatatcctgagggggagagggtgatattaatccctatattgcagaaggactacaccctcccatgacatggtttgtaatatcccagggggtagagtgtgatattactttccatatcacagggggtgtgatatgattcgtaatattcgaagggggagagggtgacactactctccatatcacggggtgtgtgatatggttcttaatatcccaggggttagaggttgatattaccccctttttggggggtgtgtacaccccctgtgatatggttcgtaatatcccgggggagacagggtgacattattccccatatcgaggggatcgtacaccccctgtggtgtggttcataatatccctagggggagatggtgatattactccccatatcagggggcgtgcactcttctgtggtataattagtaatatccagggggcagaggtcgatattcgtttccatatcatgaagggagtacacttccctgtgatatggttcctaatatccaggggggagagggtgatattattccccatattgcggggggacatacaacccctgtgatatggttcataataaccagaaaagaagagggtgatattaatccccgtattgcagagggcatacaccccccctgtgatatggtttgtaatatctaggggaggaaaaggtgatattactttccatattgctgggtgcagacacccctttatgatatggttcataatatccaagttggagagggtgatattacttcccatatcatgggaggtatacccttccctgtgatatggttcgtaatatccagaaggggagagattgatattactccccatattgtggggggcgtacaccttcctgtgatacggtttgtaatatctaggggatatagtgggtgatattactcaccatatcacgggggttgtaacatggtttgtaatatccaggggaggagagggtaatgttactccccatatctcggggcatgtacaccctcctgtgacatggttcgtaatatccaggtcgggagagggtgatattactcctcatattgccgggggtgtgttatggttcataatatcctggggaaggaggctgctatcactctccacatcttgggggatgtacactctcctgtgatatggttcataatatccagggtgggtgagggtaatattactccccatatcgcgggaagtgtacatacccctgtaatattgtttgtaatagaagagagggtgatattactccccacatcgcgggtggtgcccacccccctgtgatatggtttggaatatccagggggatgaggagggtgatattactccccatatctcggtgggagtacatccctctttgatcaagttcataatatccaaaaggaaacaggagagtgatattactccccatatcgccgggggtgtacacgggagggggagtacacccccggcgatatggtctgtaatatccagggaaggagaggagggtgatattactcaccatatcgcaggtggtctacatttacctgtgaaacagtttgtaatatccagggggggaaatgagaatgattttttttttttgagtctcactgtgtcacccaggttggagtgcagtggcacgatcttggctcactgcaacccccgcctcctggactcaagcaattctcctctcccagcctcctgaatagctgggactacaggcgcaccccacaacgtctggctaatttttgtatttttattagagacggggtttcaccatattggccaggctgatctcgaactcctgaccctgtgatccatccgcctcggcctccaaaagtgctgagattacagatgtgagccaccacgcatggcccaaggagaacgatattactccccatatcccagggggtgtatatccccctgtgatatggttcagaatatccggaaggaaagacagggatattacttcccatatcgcaaggggtgtgacatggttcgtaatatcccatgggggagagggtaatattactcttcgtattgtgaagggcatacactcccctgtgatacagttcataatattccggggagtagaggaagatattatgctccatatcgcgggtggcataagccccctgtggtttggttcataatatccagggaggagagggtaatattactccccatattgtggggacgtacaccctcctgtgatatggtttgtaatatcccagaggggagagagtgatattactccccatattgcagggacatacacccccctgtgatatggttcaaaatgtcttttttttttgaaggactggttctttatttcaaaaagacacttgtcaatattcattatcaaaacagttgcactattgatttctctttctcccaatcggccccaagtagaccacatcaaaggagagtacatattaagccaataagctgtaggatgtacacctaacagacctcctagaaaccttaccagaaaatggggacagggtagggaaagaaactttaaaagatcaacaaactgccagcccacggactgcaggggctgtcacagccagatggggtggccagggtgccacaaacccaaagaagcaaagtttcaaaataatataaaatttaaaaagttttgtacataagctattcaagatttctccagcactgactgatacaaagcacaatgagatggcacttgtagagacagcagcttcaaactcagaaaagggtaatgagatgagtttcacatggctaaatcagtggcaaaaacacaatcttctttctttctttctttctttcaaggaggcaagaaaagcaattaagtgctcacctcaacataaggggaacatgatccattctgtaagcagttgggagggggtagagatggaacaaaattttggtctcagaggtcttgccatcttaatttggtcacttctaatgaaaaaaataaaaaatagaaataacattatccaaaggtatcttaaagctgaaaacttgaacagcacattttttgttgttgttgtttggctaactcctcctggaaccacctttctggcttagctagtactttgtacagagcaatgaggcttcccatagtggagtctccctgggctctgtttggctctcagcaaggcaggcctataccttttcctctcctccatggagagaggaatatgcattaaggtgaaaaatcaccttccaaaagtgagaaagggattcgatcgctgcttcagggctgtggtattatatggaatgttttacaaaaggttgctacaaaacaacaaaagaggtaattacaaaatgtgtacatcacaacatactttttaaagacattatgcattgtgctcacattcccttaaatgttgtttccaaaggtgctcagcctctagcccagctggaatctccgggaagaggcggacagtttggtgaaaaagacacagggaaggagcgggcggcggaaggagggggcggcgaaaggagaaagcagccttccagttaaagatcagccctcaattaaaggtcagcttcgggcaggctggcctcaggcggagtctggttcagagggaggagcagcagcagggtgagactgaggcgttctacatctcattcaggtcaagcagagtctggtccagcatcctttgtgtacagaggtgctcccctttggtgcatttcagtttatcttccaagtcatcaattgtcttttccagcttggctaccgatctctcagcaaactcagcatgggtctccgcctcctttattttatcagtaagaatcttgatctcttcctcatatttgtcttctttttgagagtacttttcttcagcagcactcagacacttcaggttctggtccatcagtctaatctgctcatccatctctcggcaaagggattctgccagctcagctcgttcctctgtgcgttccaagtctccttcaatgatcaccaacttacgagccacctcttcatacttcctatctgcctcttctgcaatgtgcttagcttctctgagttggatttcctggagttccatcttttcttcatcttttaaggcccggttttcaataaccttcttacctctctcactctcatcagcagctttttccgcttcttccagcttttgcagggcagtagccaggtgctcctgagcacggtccagctcctcttcaaccagctggatcccacgttcaaggaggccacctcagcctcagcctgttcccgggcccacctttctccctcaacttctcgctggaggcgctcagctcgctcctctgcatcatctgcctgctgctgcagaacctggatcttgcgcttcaccgcctcgatggtggtgatcccagccatggtgcccacccagctactgctagagctccggttcctgcctcctccgatcggcgttgcagcctcctctcacccttacttccgcctcggttcaaaatatcttaagggaaggagttgatattactccccacatcacgggaagtttacatcccctggtgatatggtttgtaatatcccagggtggatagggtgatattactctccatatcgcgaaggagtactcccccctgtgatatggttcataatatccttggggggagagtgtgatattactccccatatcgcgagggccatatactcctttgtgacatggttcgaaatatcccggtgggggagggggtagagggtaatattactccccatacagcgaagagcatacgcccttctgtggcaaggttagtaatacttcagggaaaagagtgcaatattacttttcatattgcagggaacatacactcccctgtgacatggttcgtaatatcccgggggctgagagggtgatatttctccccatatcaccgggggcctacacctgggtgtgatatggctcataatatacagggagggagagggtgatattactccacataccgagtgaggggttacacaccctcgtgacatgttcgaaataccccaaggaggagacaatgatattactttccctgtcgcgggggctacaccctcccagtgatatggttcacaatatcccggggtggagagggtgatattactccctatatcaccggggggtgtacacttccctgggaaatggtttacagtatccccggggggagagggtactattactccccatatcacgttacatatcagggtacacccccacgtgatatggtttgtaacatcccaggaggaagaaaatgatattactccccatatcgcggtggcatacacccctccccgttaaatggttcataatatcttggggtggagagggtgatattactccccatatcacgtggggcatacaccccactatgatatggttcataatatcccggaggggagagggagatattactctccatgtcgcggggggcatatacacccctgtgatatggtttgtgatatcccgggggcggagagggagatattactctccatatcgtggggtcgtacacttttctgtgatatgattcgtaatatccagacggggagagggtgatattacttcccatattgcgggggcgtacacccctctgtgatatggttcataatatcccgaagaaaagagggtgatattactcctcatatcgcggggaacacacaccaccctgtgatatggtttgtaatattcagcgggggagagagtaatattactccctgtatctcggatggcgtacactcccctgtgatatggttcataatatccagaagaaaagagggtgatattactccccatattccagggaatgtacaccaccctttgaatatggttcgtaatatccaggaggggagagggtaatattgctcccaatatcgaaggaggtgttatacggttagtaatatccagagaaggagagggtgacattactccccacatcgtggtgggtgtgcacccacctgtgatatggttcataatattcaggttaagagaggtgatattgctttccatatcgccaagggtgtacactcccgtgaaatacagttcgtaatatccaaaaggggagagggtgatattactcccatatcgtggggggtgtacacccctctgtgatatggttcataatatccagggtggaataaggtggtattactccctgtatctcggggcatgtacatcgcctgtgatatgattcataatatccagaagaagagagggtgatattaatctccatattgctgggggtgtacaaccccctgttgtatggtttgttacactgagttggggagagggttacattactctcaatatcgagtggggcatacacacttatgtgatatggttcataatatcccagggaggagagggtgatattactccccatatcgcgggaggcatacaccccaatgtgatatggtttgtaatatctacatttttttttttgagacgaagtctcgctcttgtcccccaggctggagtatgatggccggatctcggctcactgcaacctcagcctcccgggttcaagcgattctcctgccttggtcccccaagaagttgggattacaggcgcacaccaccacgcccggctactttttgtatttttagtagagaaggggtttcaccatgttggccaggctggtctagaactcctgacctcagatgatccacctgcctcggcctcccaaagtgctgggattacaggcgtgagccactgcacctggcctggtttgtaatatctatgaagggggaaggtgatattactttccatatcacgggaggcgtacaccacgatgtgatatggtttgtaatatccagggggtatactgggtgatattactccccatatcgcggggagtgtatacccttttgtgatatggttcctaatattaagctgaggagaaggtaatattactccccatatcgcaggggtttttatatggttcataatattcaggaagagagagggtgacattactctccatatcacggggtgtgtactcccccatgtgatatggtttgtaatatccagggaaggagaggttaatattactccccatatcgcagggggtgtacacctctctgtggtttgtaatatccaaagggaagaggatgatattatcttcaatatcttggggggatacagtccccagtgatattgttcataatatccagagggggaggggatgatattactcccaatattgcaggtggtgtacaaccccctgtgatattctttataatatagagggggatgatgatattactcccaatatagtaaacaacctgtgtgtacaccccctgtgatattgtttataatatccaagggtggaaaggatgatattactcctcatatcgcagggggtgtatacccctctgtgacattgttcctaatattcaggggaggagaagatgatactactcctcatatcacaggggatgtacacccccctgtgatacttttggtaatatccaggggaggagaaaattatattattccccatgtcacagagggtgtacaccccgctgtgatagtgttcataatatccaggtgaaaagaggatgatattactccgaatatctcaggaagtgtacacccttctgtgatattgttcataatatccaaaggtggagaggaggatactactccccatatcgcagtgggtgtacacccccctgtgatatggttcataatatccaatgtaggagaggatgatattactttccatatcgcggagagtgtacatccccctgttatattgtttgtaatattcagggagaaagaggatactactactccccatatcacacggggtgtatattcccctgtgatatggttcctgatatccaagagatattataatcctctcttggattatgctacctctcatatcgcatggggtgtacacacactttgtgatatcgtttgtcatatccaaggagggagaggattatattaatcccaagatcacggggggtgtacaccctcctgtgatattgtttgtaatattaaggggggagaggataatattactcccaatataattaacaccctgtgtgtactcctccttgtaatattgttcataatatccaatgggggagacgatgatattactttcaatatcgcagaggatgtacatccctttgtaacaatgtttgtaatataaaaggcaagagaggatgatactacttccaaaattgcaggacatgtacaccccccggtgatattgttcctaatatccagtggggaagaggatgatagtagtcccaatatcgcaaagggtgtacacaccccctgggatattgttcctaatataaaaggaggagaggatgctattattcccaatatcacagaaggtgtaaaatcccctgtgatattgttcgtaatattcaggaggggagaggattatattactcccaatatcacagggtgtgtacacagggaggggcaagggccagaagcgggcgggaatccccatgtttgggcggacccagtttctaatggccagcatttgccaatcaaagcttaccagagaactctaaaagccagggctttcctgctagacaagactcatttctggaactgctttaaaaagaaacaaaacttcccaaggaccccttttcctctctgtctgcctaaaataatgttttaaaaactcctaaagcagctgaattcagcccccttcctgggggaatgtatagacggaactcccacctttcccggcatcccaaggccagagtatgtgaaactcctgggtctctatgtgtgtctgagcggctgctctgccaacactccacacagccctgtgtcctggacccaaggcccttatgacctgagctcaagaggggatctcctgatccatgggttgcaaagatccatgggagaagcatggtttctggggcggggtcacacgctcagtcactgtttccctcggatgccggagatggttcctttggctctctgccaatacagggtgaatcatcatccatccctcttttctttgttctcccgggtcaagttgtttgcctagtcagtcccaatgtgagaacctgaatatttcagttgacgcgctgacttcaaaatccccgggcttcgggaggcggagcttgcagtgagccgagatcccgccactgcactccagcctgggcgacagagcgagactccgtctcaaaaaaaaaaaaaaaaaaaaaaaaaaaaaagtccccgggcttttcttttcactcagtggaaggcagctgcttctaattggccatcttggcccgcccccaccacgtgaccttctgtaaaatgcctccactctccaggaacgctctcattatataactttgcctgaaaccaacagcacgctcattgcacatatcatgggctcatttatttcacttataaagaacctggccaaggaagagatagtgcctaaagtggccagtattctgaccgatatgttagaaaaatggtgtgccgaccaattcatgacatgtgtcccaaaactagcaacggaaattgtattcgccgtgttgaggtctctaatccagatgatgctcatctatgtactggaaaaggcagagtcctttcctgacaagctgctgaaactcttcagaaacatctcatatttcctgaagaagatgatgtctggacaagcagcacaggtcgttcagatttaactttctattcatatatccagcacgatattcgcacaattgtcacgaaaccttaccagttgatgagtcctgcacatttcctttaatttcaggaggaagagggtaatccggatgagttttctgacctactctgctgctgtgattaaacaaccaccaggaaattttgacgacactgttctcctgagctcctccctttcctccgggaacaaaacaattgaatttacaaaaataaagtgttatttgactggagtgaggtctcatgtctgcttatgcggtggctcgctgctcagaacagggtgagtctctgggttgtgtgctgaggaggggaggctctcaatctggagaaaacccactgcaggggacacctccatggggtctgagggactgaggatgaggagccggactgggtctagggaaggaggaggtttcagagggtgaaattctggcactaaagcctgggggtgtttgggaacttcctccttccgaagaagtttcagggagggataaagacaaaccctgggctccttgaggggcccttactaatttgagaggactctatcgggaaggagagtgacaatggcctccttgaggactgaggcccctgaataaatgaggcccagatacagtccatgggggatgagaccttcaagggtcacattttggttgggacagaggaaaagtgcagctctgcagccgcagaggaaaacccggcagtgtgaaagcgaccttggaggggccctgtgcgctctgaatgcgtctgagcccccatcccctgtccccgcctctctttctggattcttccagctcggctgtctccgccatcttctgagcgctccaccctgacttattcaagtttcccttctgccttccaagtactccaaaatctttcagatctgtgtccctacccctgtttttagcatgtgttggggctccaggtccctgaaggtttctggcctgaaatccacctccccagcggagtggactgcgttctagagactccacactccgcgaggttcccaggcccctgagggacaaccgagtggcctgcgcacttcagggctccacactcggcaaggtctttcaagcccttggggtccccttcttagttttttccacctttctgggctgcagtcactccataaatgctgggatctgatccccacccccactctcgtttcctcaattctgcgggctacacgctctggcaaggtcctccgggccctggatcccctccctctccctatgcccacgctcctagtcagcccttctggggtccactattttcaggaactaaccgttctcatggagccttgctaaccggaaagctgtgtggaagaaaggctttgaggatagaggtggagatttggctcttccatagtgccactcacccaccccaccatgctgccactgccagacccggacccctgtttcagaacaagtgaccagattcgctcctggacagccctggacactggccttttctctgaaaactactcaccctttctctagtccccacttcatgccagcctcataccctcttccttcccccacgctggcttccgggatcctcctctgctcagacaacctcttctgtgtcccacccccgtttttagaatgctttggggcaccaggttgggggaaggtttctggcctgatatccatctctttccaaactcccttcttcccttgaaaggcttcttgccttcagccccacttctggctccgaggtttcaggacaccctcctcttcatcctcattcttttgaccaccagctttttaggaattcgaacgtccctctcatcttcgtgaatcctgtccaggcatttgttgaccccttcatctgatacccctgacctcacattgccaaaagtctacccctacccagtacactggaattagacaaaatcccaggagttttacctcaactctgagtgtgcccacaggagctctccctgaagccacgtccttttaagcagggtctagggttcctcccttgtcttaatgaactctttgtcacacggaggacgttatggagcccttatgatctttcactgcctttctgcccagcgttttgtctttccatggacatttataatattttccatggacattttgttctctcaatgtccacccctaatttccaacatcccaaagattctcatgtgtttcctgaaagccatttacaggaatggctgtgcccagacccccttccccaggatcctccttcacacctggtaggtgcctctcctagagagatttgcactcagttgtcgtgcagtcacatggcccagatggttgttaatcacccccttcctggcaacagctagcagccagggaatcactggcacagaaacctcagggtgaccaagatgaggccacctctgtgctgaaggctgtgctccagagcctgcttgggatcaggcttaagcaggtcttcagccagacctgatgttacctggtttccttgagctgccctgcctgagctatcgggagcactccctcaatgcacatcttgattccctatctcatgctctgcttctagaaaccatgagctatcaattgctactggcaatggtcctgggaagtcaaccctaagtatggattctggggttggatgactccccacaggacttcagtgagcaacaatcactgctggcagttggaggacagagtcgctagggcatgtgaccactgtgaaaccaccgatgtttcacctggggtaattttggatgaactacggtagaagcactgaaggtacattgcttttggtttggaagattgtaggtaaataatagcgatatgaatgtggaattggatggctgcaaacgagtgccattgatgcattgaaagaggaaaagtcaggctgtcacctgtcactcagcaatttaaagtgtgagagttgggactagatgtggtggctcacatctataatccagagattcgggggaagcttgaagaggtaggatcttttgagtccaggagttccagaccagcctggacaccagagcaagacctcatctctacaacaaaattttcttaaaaattagatgggcttggtggcacgcacctgtacttgtagatctagctaatggggagcatgagataaaaaaatcacctgagtcagggacttaggggttacaatgaggtatgattgtgccagtgcacacactcccacctggccaacagagtgagattctgcttccaaaaaaataagaaataaatcaggtttgagagttggaaagcatcatcttctcctagagccaaaggacatgtacaactgagacccaggaacaaagcttcatcacaaagagaccatcatcagtggagccgggagatgcattccccctcaccctgccttgaggaggcagtggagtcatctgtctgggatcctttctgacccagccctatttgtttgtctctttggcttctttggatttgtatattttagctgttataacactgtaaaacaaacagagtgatttttttgagttgtgtgaatgatgctagctccatagtcaccctgagagtgatgggaacttttgaatttgtggcaagttggagggtagtgtaagtgacctgagattgccaaattggggctagcactggatgtgaggttaggctagtggaaaaatatgcccagaaccagaggagtgtgggctcactgcaggtggttaggctcagatccaaattgtacagatggatagctttggggtaaagaataacatagttgagaagtgcatgtgttagtctgttcatgcactgctataaagaattacctgagactgggtaattatttataaaactcaggtttaattgggtcatggttccacaggctgtacaaaaagtatgatgctggccatcagctcaacttctggggaggccccagaatagttagagtcatggcaaaaagtacaagggaagcaggctcatcttccacggccagagctggagcaagtggtaggagaggtgatacacactttcaaacaagtaggtcttttgagaactccatcaccggacagcacctatgggatggtgctaaattattcatgaaatatccgcctccataatccactcaactgtcaccagcgcagccagccccacctccaacagtggggattacaattccatatgaggtgtgggtggggacacagctccaacctcaatcagtgggcatcctggattgggtctactatagaaggagaaccaggagctgactatgatcttgaaccctacccatgatggccgggcggggtgactcatgcctgtaaccccagcactttgggaggctgaggtgggtggatcgcctgaagtcaggagttagagaccagcctggccaacatggtgaaaacctgtctctactaaaaatacaaaaaattagaccggcgttgtgctggatgcctgtaatcacaccactacgctccagcatgggaaaaaataccaaaacttcgtctcaaaaaaaaaaaaaaaaaaaaaaaaaaaaagactgcccatgaccactgcaccagtgagagggacaccagcatcactgagatgcaagggctggacattcttcataggtcagagctcaaagcaggggacactgatacagagatgggctccatccatagcaccaaagtggtgagaggatgtgggaatggcagaggccagcactttgccatcaatgcaagggggtataaggaggtgacaccagtgccagagtacatcacggggggactgccctacaatatctaggacttacctcttagagcgtgtttcattagcgacaacagatataaatggcagacaggtgtgtccctgcattaacaggaaatagaaatcatcaagaggaacagaaggcagatgtcagcagccccttagaaagtcatcatccttcatacagttaaaatctgagacagttctcacacgagaaggcctaactcaaaaagaggctgggttctcatgaggcaggtttatgcaaaaccaaggaaggtgtacaagtttggaattctccagtttcccttggaaaagacctacagtcatttgcttaggtaactgagcactgaacaaaggtgagtattgttgtcttttagaagctcttggccaagaaggccttgttggcataaaacccatggtttggaaacatcaccatgacccctgttagagtaatggcctaagggtgggggtcaggaaattgatgtattccttgccaacttctgcctctaagtgagtgaactctgtttgtgaacctctctcctctgtggttatgttcctaggctctcatgtataatcaggagtcatagacttagaaacaggaaaaatacttacagtgtttttgtggcctgtgagctatgacttataattttaggaaaaaaacaattgcaaatggaaagcctaagtctatcaatgctcatccaagacaacataatcaataaaaaccaatatcaaatctcaaggcaaattatttcctgtatatagatggcagagatgagcaccaccatcaaaaactcaaggaccagtgctgtgggtccagtcatctgtttcatggaattcaccagtctggtatcttcaaaatccagaaggatgatggcagatggcaggaaagtaatgcaaacgtcatcaggtgtgaccccactgtagcagctgtgatggatgttttctctcaccatagcaataaataacacaacctcggtcacactgtatgcattgttggtctgcaaaatccatgttttgcaaaactcttcaggaaggtggatctgtaatattggcattgacatgagaacaacagcagtatttattcacaatctcaagctctctgtcttcccgtctctctcattagccatccaagtagtcctgaggaaccaagcccatcagaacattctgcaacataatacacagctccattctccattcaaattttgttgttgttgttgttgttgatgagacaacatcttactccatcagccaggctgacgtacagtggggctatctgggctgactgtagtcttgagcttccaggctcaaggcatcctctcacctcagcctcctaagtggcttgaactacagacacacagcgacatgctgggctagtttttgtatattttgtagagacgtgctctcaccatgttattcaggctggactcaaactcctgagcgtaagtgatccaagcaccttggcctcaaagtgctgagattacaagcctgagccactgcacccagcccaatctccattctactgataacaatgtcattaccaggtctgatggacaggaaatggtaaggtttctgaaaacctaaggatcacacagcgagttccaaaggctgaaagtgcatacctgtcgacactgataccaatgacatccaatggtgagaatgacattccttgtagtcctagctctgctcataacaaatctatactgaagtgtaagagtttgatggtcatggggattttccatgtctctgcctttcagcgatgtgccatatctgtgaagtgttcagaaatgcaacagcctgaggcatgctgggcatatcctctaataaaaaggaaaatgccattttatggtcctgtatttctacaagttggaacacatgggcctgtgatccagatgggggaaatgggaatattcccactcattcaccttcatccacgaagcccatttgaaagctttgggcttcccatccttgtagattttagtgttgtgggctgggtgcagtggctttcacctgtactgccaacactttgggaggcctagacaggtgaatccactgaggccaaaagttcgagaccagcctggccaagatggtgaaaccccgtccctactaaaaatacaaaaattagcaaggtattggggccagcacctgtaatcccagctgctcgggaggctgaggctggagaatcgcttgaacccaaaaggcagagactgcagtgacccgatcctgcctttgcactccacctgggcaagcagaacaaaacttctgtcttgaaaaaaaaaacaaaaaacgaacaaaaaagatgttagagttctgggtttagaggtctataccccagaaagagaatggtttcaacaagggacaaagaagttgctttaaacgttgacttgccatttcttttcagtgtgtttgttctcttgcgtcaagagaccaccagaaaagtggtgcaattactctcctgtcaagaatcattgactatcatctgcaagagggtcagatcctggtatataattagggcagaaatacttagtctgagaagggtatgacatccagaggccctattaatgatgtccttttctccatgcctgactctgaccccatgtgctggactgcccctgtgtggatggcctcatggcctgctcggactctgaggtcccaccccaagtggcacctccatggagggctctactcttgtatgggctctgacactcacactgagacactctcccatggacacctcttcacccacttggggtctgaaactgggctactccatccctccctaacctggaacagagagctttcactgctattacacaagtcatagaggctaactcctcatttttccaagctaattattgaaacattagtcctgggttgataagacaagataagttaacttttcataaatttgcttatcaagttttgaataaattcaaataaattcaccttccccacacaccttagttgtcgacatcacacgcgcacccatactcacagggtgagcacgaaggcttcactgtcagtggagaaagtggcaaaacccttctgtgcctcatcctggtctagacctggccctcatcctttcccactcttcccctcactcccttggattcatccacactggcctcctgcctgctgctccacctccctgcgaagctcacccctgcctcagggcctttgcacgtgcagtggcttcaagccatatcctcttcacccagatctcccagatctcctgaatgatcttcttttatcattcaggtctcagcttgcatgtaatcttctcagtgaggattacccaaaccacatagttcattcattcattcaaatattcattcaatggcatattgacaaagcagctacttcatgccaggccttgggccaggtgttatggatatggcaacaaacaaaacaagagttttctgctctcaaatttttacccacttaaaggagatatcatacatcatctgtaaataaatacatcatctgtaaataatgatgtaaataaatacatcatctgtaaatctgtaaataatgatgtaaataaatacatcatctgtaaataaataaagtataataaaagaaaatagtaggtttttttggttggaggtgaccgtgaagtttgcaaataccatcttacaacacattattttattttatttcatttcatttttaattttattattattatactttaagttttagggtacatgtgcacaacgtgcagatttgttacatatgtatacatgtgtgaagttggtgtgctgcacccattaactcgtcatttagcattaggtatatctcctaatgctatccttcccccctcccccaccccacaacagtccccggtgtgtgatgttccccttcctgtgtccatgtgttctcattgttcagttcccccctatgagtgagaacatgcggtatttggttttttgtccttgtgatagtttgctgagaatgatggtttccagcttcatccatgtccctacaaaggacacgaactcatcattttttatggctgcatagtattccatggtgtatatgtgccacattttcttcatccagtctatcattgttggatatttgggttggttccaagtctttgctattgtgaagagtgccgcaataaacatacgtgtgcgtgtgtctttatagcagcatgatttataatcctttgggtatatacccagtaatgggatggctgggtcaaatggtatttctagctctagatcactgaggaatcgccacactgacttccacagtggttgaactagtttacagtcccaccaacagtgtaaaagtgttcctatttctccacatcctctccagcacctgttgtttcctgactttttaatgatcgccattctaactggtgtgagatggtatctcactgtggctttgatttgcatttctctgatggccagtgatgatgagcatttcttcatgtgttttttggctgcataaatgtcttcttttgagaaatgtctgttcatatccttcacccactttttgatggggttgtttgtttttttcttgtaaatttgtttgagttcattgtagattctggatattagccctttgtcagatgagtaggttgtgaaaattttctcccattctgcaggttacctgttcactctgatggtagtttcttttgctgtgcagaagctctttagtttaattagatcccatttgtcaattttggcttttgttgccattgcttttggtgttttagacatgaagtccttgcccgtgcctatgacctgaatggaaatgcctgggttttcttctagggtttttatggtttgaggtctaacatgtaagtctttaatccatcttgaattaatttttgtataaggtgtaaggaagggatccagtttcacctttctacatatggctagcctgttttcccagaaccatttattaaatagggaatcctttccccacttcttgtttttgtcaggtgtgtcaaagatcagatagttgtagatatgtgacattatttctgaggactctgttctgttgcattggtctatatctctgttttggtaccagtaccatgctgttttggttactgtagccttgtagtatagtttgaagtcaggtagcatgatgcctccagctttgctcttttggcttaggattgactttgcaatgcggggtcttttttggttccatgtgaactttaaagtagttttttccaattctgtgaagaaagtcattggtagcttgatggggatggcattgaatctataaattaccttgggcagtatggccattttcacgatattgattcttcctacccatgagcatggaatgttcttccatttgtttgtatcctcttttatttcattgagcagtggttttagttctccttgaagaggtccttcacatcccttgtaagttgggttcctaggtattttattccctttgaagcaattgtgaatgggagttcactcatgatttggctctctgtttgtctgttattggtgtataagaatgcttgtgatttttgtacattgattttgtatcctgagactttgctgaagttgcttatcagcttaaggagattttgggctgagacaatgggttttctagatatacaatcatgtcgtctgcaaacagggacaatttgacttcctcttttcctaattgaataccctttatttccttctcctgcctaattgccctggccagaacttccaacactatgttgaataggagtggtgagagagggcatccctgtcttgtgccagttttcaaagggaatgcttccagtttttgcccattcagtatgatattggctgtgggtttgtcatagatagctcttattattttgagatatgtcccatcaatacctaattattgagagttttcagcatgaagggttgttgaattttgtcaaaggccttttctgcatctattgagataatcatgtggtttttgtctttgggtctgtttatatgctggattacatttattgatttgcatatattgaaccagccttgcatcccagggatgaagcccacttgatcatggtggataagctttttgatgtgctgctggattcggtttgccagtattttactgaggacttttgcatcaatgttcatcaaggatattggtctaaaattctcttttttggttgtgtctctgcctggctttggtatcaggatgatgctggcctcataaaatgagttagggaggattccctctttttctattgattggaatagtttcaggaggaatggtaccagttcctccttgtacctctggtagaattgggctgtgaatccatctggtcctggactgtttttggttggtaagctattgattattgccacaatttcagatcctgttattgctctattcagagattcaacttcttcctggtttagtcttgggaaggtgtatgtgtccaggaatttatccatttcttctagattttctagtttatttgcgtagaggtgtttgtagtattctctgatggtagtttgtatttctgtgggatcagtggtgatatcacctttatcattttttattgcatctatttgattcttctctctttttttctttattagtcttgctaccggtctatcaattttgttgatccttttaaaaaaccagctcctggattcattaattttttgaagggttttttgtgtctctatttccttcagttctgctctgattttagttatttcttgccttctgctagcttttgaatgtgtttgctcttgcttttctagttcttttaattgtgatgttagggtgtcaattttggatctttcctgctttctcttgtgggcatttagtgttataaatttccctctacacactgctttgaatgtgtcccagagattgtggtatgttgtgtcttttttctcgttggtttcaaagaacatctttatttctgccttcattttgttatgtacccagtagtcattcaggagcaggttgttcagtttccatgtagttgagcggttttgagtgagtttcttaatcctgagttctagtttgattgcactgtggtctgagagacagtttgttataatttctgttcttttacatttgctgaggagagctttacttccaagtatgtggtcaattttggaataggtgtggtgtgatgctgaaaaaaatgtatattctgttgatttggggtggagagttctgtagatgtctattaggtccgcttggtgcagagctgagttcaaatcctgggtatccttgttaactttctgtctcattgatctgtctaatgttgacagtggggtgttaaagtctcccattattattgtgtgggagtctaagtctctttgtaggtcactcaggacttgctttatgaatctgggtgctcctgtattgggtgcatatatatttaggatagttagctcttcttgttgaattgatccctttaccattatgtaatggccttttttgtctcttacgatatttgttggtttaaagcctgttttatcagagactaggattgcaacacctgcctttttttgttttccattttcttggtagatcttcctccatccctttattttgagcttatgtgtgtctctgcacgtgagatgggtttcctgaatacagcacactgatgggtcttgactctttatccaatttgccagtctgtgtcttttaattggagcatttagcccatttacatttaaggttaatattgttatgtgtgaatttgatcctgtcgttatgatgttagctggttattttgctcattggttgatgcggtttcttcctagccttgatggtctttacaatttggcatgtttttgcagtggctggtactgactgttcctttccatgtttagcgcttccttcaggagctcttttagggcaggtctggtggtgacaaaatccctcagcatttgcttgtctgtaaaggattttatttctccttcacttatgaagcttagtttggctggatatgaaattctgggttgaaaattcttttctttaagaatgttgaatattggcccccactgtcttctggcttctagagtttctgccaagagatcagccgttagtctgatgggcttccctttgtgggtaacccgacctttctctctggctgcccttaacattttttccttcatttcaactttggtgaatctgacaattatgtgtcttggagttgctcttcttgaggagtatctttgtggcattctctgtatttcctgaatttgaatgttggcctgccttgctaggttgcagaagttctcctgggtaatatcctgaagagtgttttccagcttggttccattctccccatcactttcaggtacactaatcaaacgtagatttaatcttttcacatagttccatatttcttggaggctttgtttgtttctttttactctctttcctctaaacttctcttctcacttcatttcattaatttgatcttcattcacttatatactttcttccacttcatcaaatcggctactgaaggtattgcatgcatcatgtagttctcatgccatggttttcagctctatcaggtcatttaaggtcttctgtacattgttttctctacttagccattcgtctaatcttttttcaaggtttttagcttccttgtgatgggtttgaacatcccctttagctcagagatgtttgttattactgaccttctgaagcctgcttctgtcaacttgtcaaagtcattctccatccagctttgttccattgctggtgaggagctgcgatcctttggaggagaagaggtgctctggtttatagaattttcagcttttctgctctggtttctccccatctttgtggttttatctacctttggtctttgataatggtgacctagagatggggttttggtgtggatgtcctttttgttgatgttgatgctgttcctttctgtttgttagttttccttcgaacagtcaggttcctcagctgcaggtctgttggagtttgccggaggtccactccagaccctgtttgcctgggtatcaccagcggaggctgcagaatagcaaatattgcacaacagcaaatattgctgcctgatccttcctctggaagcttcgtctcaaaggggtgcctggctgtatgaggtgtcagttggcccctactgggaggtgtctcccagttaggctagatgggggttagggacccacttgagaaggcagcctgtccattcacagagctcaaacactatgctaggagagccactgctctcttcagtgctgtcagatggggatgtttaagtctgcagaaatttctgctgccttttattcagctatgccctgcccctacagatggagtctacagaggcaggcaggcctcattgagctgcggtgggctcctcccagttcgagcttccagaccactttgtttacctactgaagcctcagaaatggtgaacacccctcccccacccagtctgccgccttgcagttccatctcagactgctgtgctagcagtgagcgaggctccatgggcgtgggacccactgagccaggcacaggatataatctcctggtgtgccatttgctaagaccattggaaaagcacagtattaaggtgggagtgtcccaattttcccagtacagtctgtcacgggttccctcatctaggaaaggtaaatcccctaaccccttgtgcttcccggtgacgcaatgccccaccctgcttcagctagccctccatgggctgcatccactgtccaaccagcccaatgagatgaacaaggtacctcagttggaaatgcagaaatcacccatcttctgtgtggatcaggctgggagctgcagaccggagttgctcctattcggccatcttggaatggcaatctatgtttgctttttacatttgaaaaaactggtgtcacgtacctaggtattaatcattgtggtatcctcttgccgatttacctctttatcattaactagtgaccctccttgtcttttgttgttacagtctgtgattttagtctattttatctaatatgagaatagctactctggcacttttttggtttccagcttcatgaaatatccttttccatttccctgttttcatttccctttcggtgtctctatagatgaagttgatttctttaaggcaccataagttgggtcttatttctttatccatttgaccatttagagaatttagaacactgtcagtgttattattcataagtaaaaacttaagagtgggtgtagtggtgtacatctgtatttcctgcactttgagagactgaggcgagctgatctcctggggtcaggagtttgagaccggcctggtcaacatgatgaaaccctgtctctactaaaaatacaaaaattagccaagcatgctggcatgtgcctgtaatccaatttacttgggaggctgaggcaggagaagcttgaacctgggagacaaatgttgcagtgagctgagatcacacagagaagtcatctccactctcctcatcagaacctcttgttcacagcatttgtgagcacaaatcaatgatggttattctttcctactaattagggatattttattacacagcaatagcctccagcaaagggaaccatcatacatgattcctacaagttgacagggctggaattatcactgaaaaactaaggtggctatacttgattcccaatgtccaatttttcatgaatagagaaatttatcctttttccccccagccagaaaccaagttttgctcttacgcccaggctggaatcaagtggcacaatctcagctcactgcaacctctgccccccagcttcaagaaattcaccttttgaacaaggagatattaaggatacactatgtgtatgctaccggtggttgcaggagactcagaaaagagagaaacagtcactggcctcgtgcaactgatattctcgggaggagagaaaggcaatcaagaaagaaacatgctgtatttcagacagctgtaagtcctccacaagaaaagaaagcaggtgaggaacataggaaatgtgtcaaccataaggttcccgctaattctataagttggtcagggatatcctccaagaataagcagcatctgagcaatcacctgaagggaggaaggaaggaagactgtgagtggtggcttacacctgtaatcccagcactttgggaggccaaggagggcagattgcctgagctcaggagttcacgaccactcagagcaacctgttgatacccaatctctactaaaaacacacaaaaaaattacccgggtgtggtggcacgcacctgtagtcccagcttccatgcccagctgatttctctctctccatatatatatatatatacacatatattgtttttgcagagatagggtctcactgtgtcacccagtcatcaagcaattctcttatactgttttggaaaagcatgggaattacaggtgtgaaataccctgctggtcctgaaaaatgtgatatttgggattctctgcctggcttgttttacccaaaataatgacctccagttccttccaggttgctgcaaaagacatgattttcactgttttataactgaatagtattcctgtatgtatacataccacattttctttatttattcttctgttgattgacatgtagggtgattccatgtctttgctactgtaaataatgctgcagcaaatatttgtgtgcattttgatctattcctttgagtaggtacccagtactgcaactgcaggactgagtagttgttatattttttgttctttcagaaatctccatagtgtttgccataaaatctgcactaatttacattcccaacaacaatgcataagatttccccttttctccacattctcactaacatttgttatgtttttgtctttttcataatacccattctgactggagtaagatatctcattgtggtggttgttgatatttttgagacggggtctcactctgttgccagactggagtgcagtggtgtgatcgtggcttgctgcaacctccacctcccgggttcaagcaattctcctgcctcagcctcccgagtagctgggactacaggcgcgtgccaacaggcctggctcattttttgtatttttagtaaagacagggtttcaccatgttggccaggatgatcacagtctcttgagctcatcatacacctgcctcagcctcccaaagtgttggaattacagtcatgaggcagcgcacccaacctcaatgtggttttaatgaccatttctctgacgattcatggtgtggagaatttctttgaaataccttttggccatttatatgtgctcttttaaaaactgactcctgtccaggtgcggttgagcatgcctgtaaccccagaacttcgggaggctgaggccaatggatcacttgaggcaaagaggcagaaatcagcctggccaacaaggcaaaaccccatctttactaaaaatacaaaaaatcagccacgggctgtgactcgtgcctgtggtgcaagttactcaggaggttaaggcacaggaattgcttgaacccggtaggcacaggtcacagtgagccaagatcatggcactgcactacagcatgggtaatagagaaagacctgtctcataaaaacaaatgaataaataaataagataaaaaataaaaaagtctctttatgtcctttgccgactttttaatgggattctttggagttttctgttgtagttgagatctttgtttactctcggtattagtcttttgtcaaaggaaaagtttacaaataatttcttccgttctgcagtttgtctgctcactctgttgagaggattatttctttggctgtgcagcagctttttgtttcagtaaagcttttgaatttatataattaaaattttcagtttggtttaaatttgcactggtcgatttttggttttgttgcctgtacttttgaagtcatactcttgaactctttactagacaataaccagaagagttttctctagttttcttctcacatttttattatttcagtacatatatttaagtctataattcatcttcaattgatttttgtagaaatagtgagaaataggagtccaggtttattcttctgcaaatgacaattcaattgttccagcaccaattattgaaaagggtgtgctttcctcaacgtatattcttatcagctttgtcaaagatcagttggctataaatgtgtggctttctttctgggctctctagtctgttacatcaatctgtgtgtctatctgtatactactaccatgctgtattggtgatgatggctttgtaatataatttgaagtcaagaaatgtgatgctcccagctttgtttatttgcttcagaaaggctgagtcaacagctgcagagatgaagctgcccctcctcgcagggctccttcccggaaaaagatcatggctcccactgaccatataaccatggctggaactcctgaaattcccaaagggaggccctacccagtgaggggggatgaatgaaggtcctacttaaggaatctgtctggccacaatcaggcacagcagctgtgctgccttgtgggggaccagaccacctggattccctggagcctgcaggctagaatgtctgagtccatggaaacacagaaatggaggccgccctcacctccccagaaaactgtagtctcaggcagtctccagccgattgccactggttggctgctattccaagccagtgggtcttaacttgagaggtgctgtggaagtggggcccacggaatgaggctgcttggctccctggattcagccccttttctaagggaatgtacagatggaactcccgccttgcccagctttccaagtatataaaactcctgagtctctgtgagtgtctgagcgagtgctctggcaacattcgacacggctctgtgtatctgacccaagacccttatggcatgagctaatgggaggatcttctgatccatgcgtggcaaagatgcatgggagaaacatggtttgtgggtaggggttgtgcattcactactgcttctcttggctgtaggtgaaggtttctttggctctgtgctgatactgggtgcaccatcacccaccccctttgtttcttctcctgggtcaagtcatttgcctaatcagtcccaatgtaggaacctggatacttcagttcaaggtgctgaattcaccgtgcttttcattcaggggaagacagctgcttctcattgggcatcttggcctgcccacttcacgtcactttttgtaaaatccacaccactccaggaatatccattacttaacttcgcctgaaataaacagaaggctcattacacttatcatgggctcacttacttcgcctataatgaaggtgccatggaaatgctagtggatgacgtggtccattttcttagggatgagatagaaaaatggtgtatggctttttaatttaattaaaatttttagtttggtttaaatttacattggtctctttttggttttgttgcctgtacttttgaagtcttactcgtgaactctttactggacaatgaccagaagagttttccctaagtttcttctgatattttgaccatttcagtacatacatttcagtctataattcactttaaattgatttttgtaaacatggtaagaaataggagttcagatttattcttccgcatatgataatgcaactgtcccagtaccaattattgaaaagggtgtgctttccctagtgtatattcttgtcagctttgtcaaagatcagttgcctatgaatgtgtggctttcattttggattctctcgtctgttacatcaatctgtgtgtccacatttatacctgtaccatgctgtattggtgactatggctgtgtaatatattttagagttaggaaatgtgatgctcccagctttgttcatttgcttcagctgaaaaggttgagtccacaattacaaagatggcagccgcccatccccggaggacctccaacccagaaagagatcaggcttcccaccaaccctataaccctggctggagttcctgaaattccaacagggaggaccttcccagtgaggagggatgaatcaaggtcaaatttaaagaaacagtctggccactatcaggcacagcagcagtgctgccttgtgggggacccctcctgctccagaccagctgccctccctggagcccgaaggctagattgtctgagtctacggaaacagagacggtggccgccccaaccacccagaactcggtagtctcaggcacttggcttgctatcttgccactgcttggctggtattccaagcccgtgggacttgagaagtgctgtgatgatggggaccacaggatgaggctgtctggctccctgtgatatggctgtgatgagtggaggaacaccagggctcatgtctcacacagaattggagaaaatgacacaaacacatgtacagtggttttatggcgtgcagtttaataggcaagaacgaaggaagagctccccatactgagacagagggaggggggctccaaagccaaaagaggaaacccggagtgctgtggataccaatgagttatatgaagaaactggagggggcggtgtctgatttgcatagggttcaggcgattggttcgaccaggcatgtcatttatgtggcccacggaaaaactggccctcccacctagcctttgaatatgcacgtgccggacaccctgatttcctacactcatggggatatatgggggtggccatatcgccaggcacaggtggggacaagggccagaagagggcgggaatcgctatgtttgggtggacccagtttctaatggccggcatctgcagatcaaggttaccggagaactctaaaagccggggctttcctgctagacaagactcatttctggagctgctttaaaaagaaacaaaacttcccaaggaccccttttcctccctgtctgcccaaaataatttcttaacaactcgtataacacctgaattcagcccccttactgggggaatgtaccaacggaactcccacctttcctggtttctcaaggctagattgtgtaaacctcctgggtctcggtctgtgtctgagcagctgctctgccaacactccacacagccctgtgtactaggcccaaggccgccgtgactcagcccatgggaggatctcctgatttcttggttgcaaagatccatgggagaaaaatggtttctggggcggggtcacacactcatggcttctcttggctgtgcaagaaggttcctttggctctgttccaatatagcgtggttcatcacccacccctgttttctttgttctcctgagtcaagttgtttgcctagtcagtcccaatgtgagaacctgaatatttcagttcacgtgcttatcgtgaaattcactgagactttaattcagtggaaggcagcctcttctaattggccatcttggcccgccccctccacgtcacctcccataaaatggccacgctctccagggacgatgccattatatatctttacgtgaaaccgacagaacacttattacactttttgtgagctcatttacttcacttataatgaacatggccatggaaatgctagtggagaaagtggtcgattttctgatggatgtgataaaaaaatggtttgccgaccaattaatgacatatgtctcaaaactagtaacgagacccttaatcgctgggttgaagtttctaatcaagaagatgctcatctatgtattcaacaaagcagcttcccttgcttctgaaatgcttccaaacaacatctcatatttcctgaagaagataatgcctggacaagcagcacaagtcattcaggtttactttcagctcataaatccagcaggatattcgcacaattgttgggaaaccttatcagttcatgagtcgtgcatgtttcctttaatttcaggaggaagagggtaatctggaagagtttcctgacctactctgctgctgtgattaaacaaccaccaggaaattttgatgacactgttctcctgagctcctccctttcctcggggaagaaaagcattgaaactacaaaaataaagtgttatttggctggagtgaggtctcatgtctgcttatgcggtggctcgctgctcagaacagggtgagtctctgagttgtacgctgaggaggggaggctgtcaatctagaaaaaacccattgcatgggacacctccatggggtctggggggctgaggatgaggagctggactggatctagggaaggaggaggtttcagagggtgaaattctggcagtaaatcctgggggtgtttgaaaacttcctccctcagaaggagaagactcagggaggaataaggacaaaccatgggtcccttgaggggcatttactaacttaagaggactttatcgggaagcagagtgacaatggcctccttgaggactgaggcccctggataaatgaggcccagatccagatccagtccatgggagatgagaccttcaagggacatatttttgttgggacagaggaaaagtgcagctctgcagctgcagaggaagccttggcagtgtgaaagcgaccttggagggggccctgtgcgttctgaatgcttctgaggtccatcccctgtccccgcctctttttctggattttttgggctccatggtctccgccatcttctgagcgctccacgctgccaccttcagttttctcttctgggctccaaatactccaaaatctttcatatctgtgcccctacccctgtttttagcatgtgttgggactccaggtccctgaaggtttctggcctgaaatccacctccccagcggtgtggattctgctctagagaccccgcacttggcaaggttcccaggcccctgggggacaaccgagtggtatgtgcacttcagggctccacactcggcaaggtctttcaagcccttggggttccctcctcagttttcttcacatgtctgggatgtagtcactctataaatgccgggatgtgatccccaccccagtgattttttttagttccatgagtgttgctatctgaatagtcatcctgagagtgatgggaccttttgaatttgcagcaagttttagattagtgtgagtggcctgagatcgcaaaactggggctagcattggatgtgaggttaggctggtggaaaaatttgcccagaacctgaggagtgtgggctcactgcaggtggttaggatcagcacagaattgcaaggatgtatagctttggggtaaagaataacatggttcagaagtacatgtattagtcttttcatgcattgctataaagaattacctgagactgggtaattaattataaaaactcaggtttaattggctcatggttccacaggctgtacaaaaaggatgatgctggccatcagctcaacttctggggaggcgtcagaaaacttagagtcatggcaaaaagcacaagggaatcaggctcatcctccatggccagagctggagctagtggtaggagaggtgctgcacacttttgaacaatcagatctttttagaactctatcaccagacagcacctagaggatggtgctaaattattcatgaaatatccacccatatgatccactcaattctcaccggcccaaccaggaccacctccaccattggggattacaattacacatgagatgtgggtggggacacagatccaaactcgatcagtgggcatcttggactgggtctactatagaagaagaaccaggagctgactatcatccttaagactgcccatgatggccaggcagggtggctcatgcctgtaatcccagcactttgggaagccaaggtgggtgaatcccctgaggtcaggagtttgagaccagcctcgccaacatggtgaaaccctgcctctactaaaaacacaaaaaattagatgggtgttgtgccagacgcctgtaatcacagctactccagaggctgaggcatgagaattgcttgaacctgggaggcggaggtggcggtgagccccaatcgcactgctacactccagcatgggcaacaataccaaaacatcgtctcaaaaaaaaaaaaaaaaaaaaaaaaggctgcccatgaccactgccccagtgagagggacaccagcatggctaagatcaagtgctggacattcttcatgggtcagacattaaagcaggccacactgttacagagatgggctccattcatagcaacaaagtggtgagaagatgtgggaatggcagaggccagcactttgccatcaatgcaaggtgggcataaggagctggcaccagtgccagagtgcatcaggggaggactgctttgcaatatctagcacttacctcttagagtatgtttcattagggacaacagatataaatggcagacaagtgagtcccttcagtaacaggaaatagaaatcatcaagaggaacagaaacagatgtcagcagccctcatataaagtcatcatccttcatccagttaaaacctgagacagttctcacataagaaggtctaattcaaaaagagactgggttctcatgaggcaggttcatgcaaaaccaagggaagtatacaactttgggattctccagcttcccttggaaaagacctacaatcatttgcttaggtaactgagcactgaacaaaggtgagtattgttatctttcagaagctgttggccatgaaggtcttgctggcataaaacccatggttggaaacatcaccatgacccctgttagagtaatggcctaagggcaagggtcaggaaattgatgtattccttgccaacttctgcgagacgagtgttggtccactcatctctttcacggaattcaccagtctggtatcttcaaaatccagaaggatgatggcagatggcaggaaactaatgcaaacaccatcagttgtacctccactgtagcagcagtaatggatgttatctcttcattgtaatatccagggagggagaagatgacattattctcaatattctaaacaccctgtgtgtacagcctctgtgatattttttgtaatatccgtgtgggagagaattatattactcctaatatctcaggggttgtgccccctctgtgacaatgttcctaacacccaggaggggataggatgatatcacttttagcatcacagggggtgtacaccccactgtaatattgttcataatatccgggggggagagaatgatattactcccaatatcgcaaagactgtacaccaacctgtgatattatttgtaatatccataagaggaagaataatattactcccaatgtcacaggaagtgtacacccttctgtgatattgttcaaaagatccagttagggaggggatgatattactctcaatatcttaaacaccctgtaggtaagccctctgtgatattcctcataatatccagagggagaggatgatattactcccaatattgcatgaagtctacaccccacctgtgatattgttcctaatatccaggatgggagaggatgatattactcccaatgtcgcaggggatgtacaccttccctgtaatattgttcgtaatatctagaaaaggagaggataatattactttcaacatcgcagggggtgtacaccttccttgttatattgttgctaatatccagggaaaaagaagatgacattaccaccactattgcagaaggtgtacacccccccttgatatagttcctaatatccagaaaaggagaggagatattactccaaatattgcaagaggtgtacattcccctgtaatatttttcctaacattcaggaagaaagagagtgatattgcccttaatattgaagggagtgtgccccccccgtgatattgtttctaatatccaagaaatgaaaggatgatattactcccaatatcacaggggctgtacagccccctcccatgatattgttcccaacatcggggggggggtgaaatagtattattcccagtatcacaataggtgtacacacctgtcgtgatattgttcctaatacccatgggggaaaggacgatattattcttaatatctcagagggatgtacaccctccctgtgatattgttcctaatatccggggtgggagaggatgatattacccccaaaatctcaaagggtgtacacccctcttgtgatattgttcctaatatccagggtggagaggataatattattcccaatatccaggaaaggaaacgatgatgttactgtgaatattccagggggtgtcctcccctctgtgatattgttcctaatatccaggttggggagattatgatatttctccaaatatcacaaggggtgtacaccaaccctgtgttattgttcctaatatcgatggggggagaggacgatattactcccaatatcacagggggtgtacaccacctttatgatattgttcctaatatccatgaagaaagaggatgatattactttcaatatcgcaggggatgtacactccccctgtgatattgttagtaatacctaggagaagaaagtgtgatattactcccaatatcgcaggggatgtacacgcttcctgtgatattgttcctaatatttagggggaaaggggatgatattactcccaatatcgaatggtgtgtacacccccccgtgattctttttttttttttttttttttttttgagatggagtcttgctctgccgcccagactggcgtgcaatggcgcaatctcggctcactgcaacatttgcctcccaggttcgcacgattctcctgcctcagccttcggagtagctgggattataggcagctgtcaccataccaggctaatttttgtatttttagtagagttggggtttcaccatgttggtcaggctggtcttgaattcctgacctcaaataatccacccaccttggcctcccaaagtcctgggattacaggcataactttccctgtgatattcttcctaatattcaggaagaaagaggatgatattgctcccaatatcgcagagagtgtgcactcctcctgtgatatggttcttaatattcagaggaggagaggatgatattactttctatattgcagaaggtgtacacctccctcgtgatgtctttcctaatatccagtgggggagaggttattagtctcaaaatcacagaaggtgtaaacccccatttgatattgttcctaatattcaggggtggggagagaaaggtattactcctagtatttcagggcatgaacacccccaccgtgatatcattcctaatatccagaaggggaggcaatgatatttctcctaatatcacaaagggtgtacaccccttctgtgatattgtaaatattctgtgtgtacacccccctgtgttatagtctgtaatatccgggtgggggagagggtgatatttctccccatattgtaggggatgtacacccttctgtgatatggttcgttatatccagggaagaaaaaggtaatattgctgcccatattgtggagagtgtacacccccatgtaatatggttcgtaatatccaggagtggagagggtgatactgctccttacatcgaggaaggtgtacaccttattgttatatgattcgcaatatccaggggaggagagagtgatattgctccccatgtcgcagggggtgtaaaccctccgtgatatgattggtaatatccaggaaaggaaagggtgatatttctccccatatcgcgggggacgtacatcctcctgtgatatggttcgtaatatccaggaggaaagaggaaaatattgctcttcataacccgaggggtgtacaacccctgtgatatggttcgtaatacccagaagtgtacacccctctgtgatatggtttgtaatatccagggggttagagggtgatattgctccccatatcgcagtgggggtacacccccctggattggttcataatattcatggggggagaaatttacatttatcctcatatcagggggggtgtacaccccccgtgatatggttcgtaatatccaggggaagaaagggtgatattgctccttatatcgcggaaggatcaccctcccctgtgatatggttcataatacccagacgggaagagggtgatattgttcttcataaagcgaagggtgtacagccccctgtgatatggttcataatatgcaaaaggggagagggtgatattgctccccatatcacggagggtgtactcccttctttgatatggttcgtaatatccaggggtgtagatggtgatatagctcgccctattggggagggtgttcacccctctgtgatattgttcgtaatgtccagggaaagagaggatgatattactcccaatatcgcagaaggtttacaccactctgtgatattgttcataatatccagggaaggagaagacgatattactcccaatatggcagggggtgtagaactcctgtgatattgtttgtaatatccaggcaaggagaggatattactctcaatatcgcagaaggtttacacccctatgtgatactgttcatgatatccagggaaaaagaggatattactccctatatcacaaagggtgtacacccctttgtgatattttttgtaatatccaggggagagaggataatattactctcaatatcagaaggggtgaaaaccctcctgtgtcattgttcataatatttagggaaggagagagtgatattactccaaatatcacagtgggtgtacacccccctatgatattgttcctaatttccagaaggggagatatgatattattgccaatatcgcagaaggtgtacaccttactctgacattgtttgtaatatccagatggggaaatgatgatattactcctaatatcacagggggtgtacacccccttgttttattgtttgtaatattcaggggaagagacgattatattactcccaatatcgcagggtgtgtacaacactctatgatattgttcataatatccaggggaggagaggaagtgtacacccccccgtgatattgttcgtaatatccagaggtagagaggatgatattactcccaatattgcaggtggtgtacacctttctgtgatattgtcatgatattaagaaggggagaggatgatattactaacaatatcacaaaaactgtacactccctgtgatattgttcataatatccagaagaagggaggatgatattattctgaatctcgcagaagatatacaccaccctgtgatatggttcataatatcctaggggaaagaggatgacataactgtcaatatcgcagggggtgtacaattccctgtgatattgttcacaatattcagagggaaaaaggataatattactttcaatatcgcaggcggtgtacacattactgtgttattgtttataatatccggaatgagagaaaattttctcccaatatcacaggaggtgtacactcccctgtgatattgttcgtaatatccagggaggggagaggatactattactcccaacatctcagggagtgtaggccccccctttgatattgttcctaatattcggaagtggagaagatgatattacttccaaaatcgcagggggtgtacactccctctgtaatattgtttctaatattcatgagtggaaagaaagatattactcccagtattgcaggggacatacaccacactgtgatcttgttcacaatattcgggggggagaggatgatattactcccaatatcaaagtaggtgtacacccccttctgatattgatcgtaatatccagaattaaagatgataacgttactcccaatattgcagggggtgtacatttttgaatactgttcataatattaagagggggaggggatgatatctgtcccaatatcgcaaagtgtgtacacctcctgtgacattgtcccaaatatccagaggaaaaaaggatgttattactcttaatatctcagagagtgtacacctccctgtgatattgtttgtaacatccagaagaaagaggctgatattactcttaatatcgcagggggtgtacacccccgccccgggatattattcgtaatatccagggggaagtggaatgttcagaatgggagaggatgatattacttgcaatatcatagtgggtgtacaccccactgtgatattgtttgtaatatccgggaaaggagaaaatgacattcctccccatatggcaggggctgtacaccacctatcatattgttcaaaatatccagaaggggagaggatatgtctccaagtatcacagggggtgtacaccccgctgtaatattcttcctaatatccagggtgtgagaggataatagtactcccaatatcccagggcatgtacaccccccttgtgatgttgttcctaaaattcatggggagaaagaatattactcccaatatcacagggggtgtacatacactctgtaatattgttgccaatatgcagcaggagagaggatgatattactcccaatatcacaggggctgtacaccccgctgggatattgtttctaatatcaagggggaaaaaggatgatattactcccaatgtcgcagggtgtgtacttcctctttgtgacattgttcctaatatccaggagagaagagggtgacattccttccaaaactgaaaggggtgtacacaccctttgagatattgtctttaatatccagaacgaaacaggatgatataactcctaatactgcaggggggtacaccctctctgtgatactgtttctaatatccaggaggggaaagaaaaatattaatcccaatatcacagggggtgtacattccccctttaatattgttcctaatatccaggaagacacaggatgatactatttccagcagcacagggcatgtacacccctttgtgatattgttcctaatatccaggaaaagagaggatgatattactgtcaatattgcagggcgtatacactggttctgtgatattgtttctaatatccgggggtggagaaaatgatattactcccaatattccagcgggtgtacacccgttctatgatattgttcctaatatctgggggagagagaatgatattattgtcaatatcacaggggatgtacagattccctgtgatattgtttctaatattcacagggggagaagggtataatactcccgatatcgcagggggtgtacactccccctgtgaagttgttcctaatatccagggattgagagaatgatattactcccaatatcacaggcggtgtaaaccccctgtgtgatattgttcctaacatccagaggaaaagatgatgatattattttcaatatcacagggggtgtacgcatccctgtgatattgtttctaatatccaggggaggagaggatgatattattgttaatatcgcagggggtgtaccccaccctgtgatactgttcctaatatccggggtggaagaggataatattgctcccaatatcgcaaagggtgtacaaccttcctgagatattggtcctaatatccagggagggagaggatgatattactttcaatatcacagggagtttacacaacccctgcgatattgttcctaatatccagcggaagaagagttaggataatactattttcaaaattgctgggtctgtaccccctccccgtgatattgtttctaatatccaggaggggagaaagtaatatgactcccaatatcttagaagatgtacaccctccccataatattatttcttacatccagggggtagaggatgattttgctttcaatatcacagagggagtaaacctttccggtgatattgtttttaatatttaaaaagagagaagataaaattactcccaatacaaaggggatgtattgtgtactcccccctctgatattcttttttaatatccagatggagagaggatgatattactttcaatattgcatgggatgtataaatcccctgtgttattgttctgaatatacaggtggggagagtatgatattactccaaatatcgcagggggttctttccccctgtgatattgttcctaacattcagggagggagaggatgatattactcttaatattgcagggggtgtacccacgcctatgatattgttcctaatatccagagggggagaggatgatctaactcagaatatgacaaggggtgtacacacagcctgtgatatggttcctaatatacaggggagaaggggataatatttctcccaatatcgcagggggtgtacaaccccctgtgatactgttcctaatatacagaaggggacagcatgatattgttcctaatatcgcaggaggtgtacaacgccctgtgatattgttcctaatatccagggcgggagaggatgatattaccctcaatatcgcagggggtgtgcactttccctgttatattgttcctatgatccgggtggggggaaatgacattagtcccaatatcgcaggatgtgtgcaccgctcccccgtgatattgttcctaatatcaagggggagagaggaggatattactcccaatatcgcaagggatgtacatcctccatgcgatattgttcgtaatattcaggaggagagaggatgatattactcttaatatcgcagaaagtggacacccaccctgtgatgttcttcataatatccagggaagcagacgattatatgactttcaatatcgctgggagtgtacatcccttttgggatattgtttctaatatccaggaagggagaggattatattactctcagtattgcaggcagtgtacaccttttttgtgatattgttcctaatattcagaaagggaaaggatgatattactcccaatattgcaggtggtgtatatccccctctgatattgttccttatatcaaggaagagaaagaataatattactcccaatatcaaagacagtgtagacccctcctgtgatattgtatttaatatccatggggaaagaggatgatgttactcccaatatcgcagggggtttacacccacactgtgatattattcctaaaatccagtggaggagaaaataatattgctcccaatattgcagggtgtatacaggccctcccccgttatattgctcctaatatccagcggtggagaggatattactttcaatttgtgtagggagtgtatacccccctgtgatatttttctaatatcaaggatgggaaaggatgacattactcccaatatcgcaggaggtgtacacgccctgtgatattgttcctaatatctagggaaggagaggatgatattactttcaatattgcaggagctgtacaccctctgtggtattgttcttaatatttaggttgggagaaaatgatatgagtccaaatatcgcagaaggcatacacacttccaataacattgttcttaatatccgggggagagggtgatattactcccaaaatctctggggggtgtacacccccttctgatatttttcctaatatccagggaaggaaacgatgatattactataaatattccaaggagtgtacaccttcctaatatcctaatattgttcctaatatccaggggtgggagaggattatattactcccgatatcgcagtgggtgtacacccctcctgtgatattgtttctaatatccaagctaggagaaaatgatatcactctcaataccacagggggtgtacaccttccgcatcatattgttcctaatattcagagggaaagaagatgaagttactttcaatatcggaggggttgtacacaacccctgtgatattgctgctagtatccaggaagaaaggggattatgttactccccttatagcagggggtatacacctcccctgtaatattgttcctaatatcaaggctgggatatacgtggggggaaggatgatattactcccaatatcgcaggggttatacaaccttctgtgatattgctcctagtaaccagggcagaagaagatgatattactcctaatatcgcaggaggtgtacactcccccattatgttgttcccaatatgcagaaaaggagaggatgacattattgccagtatcgcagggtgtgtacaccacccctgtaatattgttccaaatatttagggggagagaggatgatattactcccaacatcgcagggggtgtacacacatcccctgtaatatagttcttaaaatctaggggaaaaggggatcttatttctctaaatattgcagagggtgtacactccccggtgatattgttcctaatagccgggagggagataattaaattactttcaatatctcagagagtgtacatcgcccttgcgatattgttcctaatatccagagcaaaagagaatgatattactcccaatatcttaggagtgtacatttaacctgtaatattgttcctaatatccagggggaagagaatagtattactgccaatatcgtaggggttgtacaccttttctgtgatattgttgcaaatatttagtagagggaaagaatattactcgcaatatcacagggaatgtatacttcccctgtgatattgttctgatatccagaaaaagagagggtaatattactcccaatattgcagggggtgtacaccccccttgtgatattgatcctaatataaaggaaggaagaggatattactcctcatatagaaggggttgtccaccccccttgtgatattattcctaatattcagggaagcagaggatgatattattttcaatatcacagagggtgtgcagtccacctgtgatattgttcttaatattcggggggagaggatgttattatgcctgatatcgcagtagaggtacacccctcaagtgatactgttcctaataaccaggggtgaagaggatgatattactcccaatatcgcaggtggtgtacacccccccatgatggtttctaatatacagagggggagaggaaaatattactcccaaaatcgctggaggtctacaccccccttgtgatattgttcctaatatccaggaaaggaaacgatgatattactgtgaatattccagggggtgtacacccgctttgtaatattgttcctcatatccagggtgtggagaggattatattactcccagtatcgcagggggtgcacgacgcccctgtgatattgtttttcatatccaggaggggagattattatcaatatggcaaggggtgaacaccccctgtgatattgtacttaatagttaggttggcagaaaatgatattagtctcgatatcgcagggggtgtgcactccgcctggtgatattgcttttaatatcaagggggagaaaatggcattactcccaatatcgcagggggtgtacaccgctcatgtgatattgttcctaatatccaggtggagagaacataatattactcccaatatcgcacaaggtgtacacccctcctgtgatatggttcctaatatccatgggaggagatgatgatattactcccaatatcacaggggatgtacaccacccttgtgatattgttcctaatatccagggaagaaaacgatgatattattgtgaatattacagggagtgtacacactccctgtgatattgtttttgatatacagggtgggagaggatgatattactcccaatatcacataaggtgtacaccccccgtgatattgttctaaatatttcggtggggagaaaatgatattagtctccatatcacagggggtgtgtgctcctcaggtgatattgtttttaatatcaagagggggaggagattatattactttcattatcacagggggtgtacacccctcctgtgatattgttccttatatccaggcgaggggaaaataatattactctcaatatcgcaggaggtgtacacaccccatgtgatattgttcctaatattaagggggaaagaagataatattactttcaatatcacagggtttgtactcctttcttgtgatatagtttttagtatccagggggaaagagcatgatattactcccattgtagcaaggggtgtacacacctcctgtgatattgttcctaatatccagaagtggtgaggatgatattactcccaatatcgcagggggtatacaccccacctatgatattatttctaatatccatgggaaaagagtatgatattacacccaatgtcgcagagggtgtgtatttttcctgtgatattgtttctaatattcaggcggggagaagatgatattactctcaatatagcagaaattgtacatccccgctgtgatattcttcataataatcagggaaaaagaggatgatattactaccaatattgcaggggggttacacttcccctatggtagtgttcctaatatccaggaagaaagaggatgatattaatcccattatccaggaagtgtacacccaccctgtcatgttgttcctaatatccagcagggaagaggatgatattacaccccccccccgtgatattctccttaatatccaggaggggagaggctgatattactggatatatagcaggggtgttcataccttctgtgatattgttcctaatatccagaaaaggagaggatgatattacttccaatatcgcagaaggtgtacacctccctgtgatattgatcctgacattcagaaggggagaggatgatattactcaaaataccgcagggcatgtgcattcccttgtgatattgttcctaatacccagaagggaacaggataatattactttcaatatcgcagggagtgcacacccccctttggtatggttcttaatatccagaaggaaagagggtgctattactttccatattgcaaggggtgtacaccccactgtggtatggttcataatatccaggcagggagagggtgctattactccccacagtgcggggcatgtacaccctgctgcggtacggttcctaatatccagggggagagaggatgctatgactccctatatcgcggggtgtgtacacccctgtgtggtatgttttgtattctccaggaacggagagggtgttgttacccctcatatcgctggaaatgtacactcccctgtggtatggttcgtaatatccaggggattgagggtactgttacccccatactccccatatcgtggggggagtgcacctccctgtggtatggttcgaaatatccagggtaagagagggtgctattattccccattttgcaggaggcgtacacccccctatggtatggttcgtaatatccggggtgaggggatgctatcaaaagaagagagaaagagaccccccatattgttctatattattttatactcagtacctgttttaagaagaaacaaggaagtgaaaccaaaagcaggcagcccggcgccaggcaccagacccaaaaccagacccgaaaccaggcctgggcctgcctgaccttagcctgatagttaaaattcaacccatgacctagcaaccaatgttatccatagattccagacattgtatggaaggacattgtgaaatttcttgttctgtgctgtttcactctgattaccggtgcctgcagcccctgtcacatacccactagattgctcaatcaatcatggccctttcatgtaagatctttagtgttgtgagcccttaaaaaggacagaaattgtgcactcaacaagctcggattttgagacgctagtctttcgatgcttccagctgattaaaagccacttccttcactacctcggtgtctgtggggttttgtccgcgactcctcctgctacactatgactccccatatcaaggggggtgtacacccccctgtggttcgtaatatccagcaggggaaaaggtgctattactccccatattgcagggagtgtacacccccttgtagtatggatcgtaaaatcaaggggggagggaaggtgtaattatccccatatctcagggggtgtacacccctttgtggtaaagtttgtaatatccagggatattacagggatattatccccaaattaatacttttataatttcttatgcctgcctttactgcaatctctgaacataaattgtgaagatttcatggacatttatcacttccccaatcaatacttttataatttcctatgcctgtctttactttaatctcttaatctcatcatctttgtgagctgaggatgtatgtcgcctcaggaccctgtgatgattgcattaactccacaaattgtttataaaacatgtgtatttgaacaatatgaaatctgggcaccctgaaaaagaacaggataagagcgatgttcagcgaacaagggagataagcataaggtctgactgcctgtggggctgggcagaacagagtcacatttttcttattgcagaaaatgagtaggagaaatatcactgggaagggaacgcattcctaggggaggcctatggacggccgctctgggggtgtatcccttatgtggttgaagataagggatgaaatacaccctggtcccctgcagtgccctcaggcttgctaggattagaaattccagcctggcgaattctagtcagaccagttctctgctcttgaaccccgtttcctgttaagatgtttatcaatgacaatgcgtgcacagcaggacatggaacctcaatagtaattccattttctccctggccttgtgaccttgctaggcccttctgcccttgtgatcttttattgccatttgaagcatgtgatctctgtgacccactccctattcgtatccccctccccttttgaagtccctaataaaaacttgctggttttgcagatcaggtggtcatcacagaacctgccgatatgtgatgtcaccccggaggctcagctgtaaaatttctctttcgtactctttcactttatttctcagaccaggtgacacttaaggaaaatagaaaagaacctactttgaaatattgggggctagttcccccaatagacattgttcctaatatccagaaaaaaagaagatgatattactcccaatatcacaggggttgtgaaccccacctgtgatatggttcctaatatccaggaagggagagaatgatattactctccatattgcagggggtgtgcacatccctgtgatattgttcctaatatccaggggaggagagggtgatattactcccaatattgcaagggttgtaaactccaccctgtaatattgctcctaatatttaggatttagggggggagaggataatattactcccaatatcgcaggggatgtatatgccctctttgatattgttcctaatatccagggggggagaggataatattactttccatatcacaaagagtgttcacccccctgtgatattgttcctaatatccaaaaaggaagaggatgatatcaatcccaatatcacaggaagtgtacaccccccccttttatattgtttctaatatccaggggaaatgagggtgatatttctctcaatatagcagaatgggtacactccccctgggatattattcctaatatccaggggaaaaaaagaggttgatattcttcccagtatagcagggaatgaatacaccctttgtgatattgcttctaatatcaaggggaaaagaggatgatatgactcccaatatcacaggggatgtaaacctgtggcgttgttgctaatatcaaggagggaagagtatgatattactcctaatgtcgccgaaggtgcacactttccctgtgatattgttcctaatatccaaaagggaagagaatgatattacccccagtattgcagggtgtacaccacccctgtgatattgctcctaatacccaggaaaaaagagaatgctattacccccaatatctaaggggacgtataccttccctgtgatattgtttctaatatccaagtggggagaggatggttttactctcaatattgcagggagtgtacactccccctgtgatactgtttctaatactcgggctgggagaaatagtattactcccaatatcgcagtgatattgtttccctgtgatattgtttctaatatctagtgggggagataattatattactaccccatacacaggggagggtgtacattcccctgtgatattgtttgtaatatccagggaaggagaggatgttactcccaatatcacaggggttgtacaccccttttttgatattgttcctaatatctggggggcagagaattatattactgtcaatatcacagagtgtgtacaccccctctgttatattactctttatattcagggcggtagaggatgatattactccctatatcacagggggtgttcacccctcctgtgatattgtttataatatctaaggggaaagaggatgatatcactctcaatatcaaaggaaatgtacacctttcctgtgatattgtttttattatataggggggcagaggatgatattaagaacaataccacaggggatgtacacccacgtattgatattgtccctaatatgtatggggaaagaggacagtgtaactcccgatatcgcagagtgtgtacacccccttgtgatattgtttctgatatacacggggagaaaagataatatttcttccaaaattgcagggggtgtacaaccccctgtgatattgtttttaatatccagtgggggagagaatattactcccaatattgcagggcgtgtacacaacccctgtgatattgttcctaatatccagagtaggggaggatgacattactttcaatatcgcaaggggtgtacattcccctgtgatattgctcctaatatccatgaggggagaggatgatattattcctaatatggcaggggctgtacaccttccctgtgatattgtttctaacatccagtgggggagaaaatgatattactccctatatcacagaaggtgtacactttccctgtgatattgttcctaatatccagaaggggagaggataatattactcccaatatcgcaggaagcttacaactcccctgtgatattgtttctaatatccagggaggtagggatgatattactcccaatatcgcaggggatgtacactcccccgtgacattgtttctaataaccagggggtgagaggatgatattacgcttaataccgaagggggtgtacacacccttgtgatattgtgcctaatagccagggggaagaaaattatattaattttaatatttatggggaaaaaggatgatattactcccaatatcacaggggctgtacaccgaccttttgatattgtttttaatatccagaagagaagaggataatattgctcccaatatcagaaaaggtgtaaaccccttctgtgatattggtcctaatatccagggagggagagaataatattactaccaatatcacagaaggtgcccacccccaaggtgatattgctcctaatatccaaagataatagggtgatgttactcccaatatcacaggaggtgttcacaccccttgtgatattgtttctaacgtacagggaagggagaggatgatattattcccaatatcacaggaggtgtatactcctctgtgatattgattttaatattcggggggaaaggatgatattactccctatatcgcagagggtgtacaccctctgtaatattgatcctaatatccagggcgggataggatgatattactcccaatatcgcagaaagtctacacaacccccagtaatattgtttttactatccagggggaagaggatgacattactcccaatttcacagagtgtgtacactcaccatttgatattgtttctaatatctagggggagagaatatattactcccaatatcacaggaattgtacaccacctctgtgacattcttgtgaatatccggggaaaaagagaataatattactcccaatattgcagagcgtgtacacccctccatgatatcgatactaatatttttttaaagaggatgatattactcccattgtcacaggatgtgtacaccccccttgtgaaattgttcataatattctggggggagagcataatattactccccatatcgaaaaaggtgtccaccctccttataatatggttcctaatatccaggatattacttaatccaggatacttgtaataccctaaatatacaattgcttgaacctccacctcccaggttcaagcaattcttctgcctcagcctcccgagtagctgggactacaggggcacaccaccacacccagctaatttttttttcttgtatttttagtagagatggggttttgccatattggccaggctggtctcaaactcctgaccttgtgatctgcccacctcagcctcccaaagtgctgggattataggcgtgacccaccgtgccaagccaggaagaggatgctctatagatttccccaataagagatggctttgcagggccattccaaaatatgtcaaagaaatacatttggggataaaatactttgatttcctttagggaatgttatctattatgtgatgctataccagagtcaggttggagtcggttatcttattgcaacaaagagtctgttccgtcactgttgggatctctattttttcctcttatttcttgagacagggtctcactctgtcacccagtctggagtgcagtggtgcgatcttcattcactgaaacctctgcctcctgtgttcaggtgattctcgtgcctcagccccttaagtaactaggattacaggtgtgcgccaccacacccagctaatttttgtattttcagtagagatggtattttgccctgttggccaggctggtcttgaactcctggcctcgtgtcatctgcccacctcgacctcccaaagtgctgggactgcaaatgtgagctattgtgcccagccaggatctctgttttaatgttagtgctggtcactttgcatgaactccaaagggaagaaatataatgaggtgtgtctgaccccctgccttctcatcgtgacctgaattagtttttcaggtttgcaggggatacccttggacaagaaggggctctattcggttggttggggggattagaattttactttttgtttacaatatttctcctgaaagagttaggggctcacaaggaatttccgcgtgagcaacttatgaggaaagccatctgggaagatatgtgtccttgtgtcactgggatattctcgtttaccccaatgatacggcaatgacgcagggttgtgaaattacagctatgtgtttggggaaaaaagaaagcaggattgtgtgactacgtttccaaacttcacttgcccttagccatagtgagttgggggcctggagattctgttttctttcacaatgatatagatacaattaaatgtatagaaagcaaaaaaataaaaaggtgagtaatgaggaacctctgattcctgagtggccatgtagttacccatggcacagagccacagttactgaaggtaaagtttgctggggaatttagaaatgaatccagctcttggaggagtcagtttactggatgcctaagaaaatgcaaacaaaataagaaaaaagggtaatattcaatcccatagttattgttacctgtcatagctaaagtaaaattaaaacagagtgctggcttcaatcttgatgctacactaagcttagatttcagtgaatgtgagtctcagccactagctcagagccacctcccaaagaccaaatcatgtagggacaatagaaagtacttctgagaattgtggttaccaagaacctagtaactgttggggaggagcaaaacaaagtacagaaaccagagggtacaatctgagtgagactgctatcagcttctggaggagcctttactaaaatgaatgatgagagtaactggatgatgagagtaactaatggatgatgagagtaagcaatgtctttggttttcttttttttttttttttttttttagcagacgtctcactcttgtcgcccaggctggagtgtaatggcatgatctcgcctcactgcaacctccacctcctgggttcaagcaattctcctgtctcagcctcccgagtagctgggactacaggcactcatcaccacacctggctaatttttgtatttttagtattttctggtgagggtccaggtttccggaaacaactcagagacatatgttaagatgttatctttagttttcacagggaaccaaatatgttacgactccaatttccttggctattgttttaagttaccattaccttctcgttgatcaagttgctcatttacttctcaagcctagctagatgcctggaatttcccttgaaggaagtcaagattttcctttatctccatactggctgatggtgatcgagtaagcccctaagaggggtccctgctccatctcgagatgctgctagattctacagtgcctaataaacagctctcgcctggccgacaaagagctgcttgctctctggatagcaattccaaagtgaacagacaacatcctgtttggaagactgccactctgttagaagaagcatcaggaaaacctttcttttgagctatttataactaacagcaattgaccaagtatacttttgtgagtgaaactgacctttctccctgtaagaattctccaaaatttggaaactatttgtgagtatttttacttatggcaatataattattggcacaagctcaatcagattcggttttctttcgtaacaggaaccattggagatactcattactctttgaaggcttacagtggaatgaattcaaatacgacttatttgaggaattgaagttgactttatggagctgataagaatcttcttggagaaaaaaagactgggtatattttcaatatgctttccttttaaggtccctcacctgtggaaagtaaagaatgtcactttctgacaggctcaggaacctcaagttatgtagggatctcaagaagatgggggaattcacccagttcatacaggtgaaattgctgttgcaaagattatgaatatgagagaagtccagcatggctgacttcatctcgtgtctggcctcaggctggctgcccttgctcactcttgggcataggccaagctagccatgggaggaatttagtttatagtttaactttgaagcacggatgataatagtctctccctaaaatgaaccccttccttgctcagggactgaaactacctttgtatgacaaatgaaagcccacaagattaagattatgagaggggcctgaattctgctaaaatgcaggtgtagctgactgataacaagtcattgtcccacagcttgcctttctataatctcttgcttctcaggagtcacatggccagaggtcctgagatttccagtcctgtgacccccacccagagatggacttagtgcatgaggaccattttccacacccctatgatttcatcctcaaacaatcagcagcaaccattccctagccccctgccttccaaattatccataaaaatcctagcctctgagttattagggagattgattaataatcccagtcctaccccttgggttgctctgatttaattaaaccttctctactgcaataccacggactcagtaaattggttttgtctgtgcaatgggcaagaagaacatgttgcatggttatacaggtactacaagcacagtctgatggcaaattattggttttgcttcctgcccttgatgtttctaaacatctagtccaaaattacttgtgaaaggtccagcaaagccaattttaaaagaggctatatggccaatcactattctttctacacattattgcaaataatcaggccacggctgggcacggtggctcatgcctgcaatcccagcactttgggaggctgaggcaggatcacctgaaatcaggagttcaagaccagcctaggcaacatgataaaaccctgtctctactaaaaatacaaaattagccaggcatggtggcatgcacctgtaatcccagctacttgggagactgagggaggagaatcacttgaacctgggaggcagagattgcagtgagctgagatcacaccactgcactccagcctgggcaatagagtgagactttgtctcaaataataataataataatcagaccaagtataatgaaattaaaatttattttgcaaataaattggtcctactacaatttatccttcatagaaatgtggaaactgaagataaaaaaaattaggtttcagaagaaaactatactacacctgttattagattctagccctaaacattgtttttgaggtttttattatttacctgcaatttggtctaaattctgaattatttcctgactacaagtatccaaggaataaatgggttttctttttctttatgatagttttagttggcttctaatgcaacaacaatttttattgtaatcctgtgtgcattctattcctactattcaaattattaatgttatagatctttcattgtagtacttctgaattaaccaaaatcacagtattctgaagatgattctacaaagcctgctgtttctacaaaggctgctgatgatttctacaaagcctgctgtagtgttgctgtggcctctgcttaaaaaagtagaaaacacattgatgcagcatgttcaccccaacctccctgcctaaaggctcagggaccatcttggaagaggaaggcgcgtgagattgtaagagccgaattagggggatggagtgtggagaataaggacacttcatcttggatgctcacctgccaaattgacttctgatgaaagccagctccagaaatgtgcctacagttactactttcacctaaaccctgcccttagtcaaatccttctcttcttctaagcaatcaacttcaattccttgtataacccacagtataaaagggcttttataccattctatcctattgcatgtaagccttgggtctgggaggtaacagtgtgggattccaccatctcatctccctgccacccaaacatgcctgctcttctttaagcaatattaaatgtttgtacttcagaaatttgatttgtcagcctcttcttcagactctcagcttctttggcctttgggagtaaatttgcataggcctgctcaaaacaggatgttctgggggtttgggggtgttgttttgttttgttttttgttttgtttagagacagggtctcactctgtcacccaggttggagtgcagtggtgcaatcatggcacactgcagcctcaaactcctaggctcaagcaatccccccaccttggcctcccaaagttctgggattacaagcataagccaccatgcccagccctggacttttctttaaagacatttacacagtgtaggaattactgtgggtgcactgctcaggtccccttctccaggatgctcattcctacctcatagatgattttcctgcagagatttgacctcagctgaagggcagtcacctggtccaggtggttgctattcacctccttcctgagaacagccaacagccagggacacgctagcacagagatataagagcgaccaaggtgaggccccttctgtgctgcggtgcatgctccagagcctccctgggatcagacttaagagggtctccagccagatctggtcttcgctgctttcctcgagctccccagcgcactcctgcaatgcatcttttttttttttttttttttttttgagacggagtttcactcttgttgcccaggctggaatgcaatggcgcaatctcagctcaccacaacctctgcctcgcgggttcaagtgattctccttcctcagcctcccaagtacctgggattacaggcatgcaccaccacgcccagctaattttgtatttttagtagaaacgggtttctccatgttggtcaggctggtttcgaactcctgacctcagttgatcctcctgcctcagccttccaaagtgctgggattacaggtgtgagccactgtgcctggcccaatgcacctcttgaatcacctcctcatgctttgcttttagagaacatgatccccaacatgtgattccagcaaagattctagaaagccaaccgtgacaatcacttctgggtttagatgacccccccccaccacaagatggcagtgagcacctcatcacagaggtgctgatggtctgcagcaccgcgccaggccagaacgtgccttttacagaagaaaataacccagtagctgactaggatggtgaggagggctggtgagcactgcggtagtgagagggacactagcatcactgagatgcaagtgatggtcatttttcataggtcaaagctcaaagcaggggacagttacagggcagggcttcatagcaccagtgtgatgaaagtatctgggagtggctaaggccagcactatgccatgggaagcaaggtgggcctgaggaggaggcagcagcgtcagcctgcaacaagtgggggctgccctgcagagacctaagagtcatgttatagagcacagtgtctgtaaggccaagaagtgtggacagccaagtgtgtcaattactagacatactcaagaggagcaggaagggcagggcatggtggctcatgcctgtaatcccagctacttgggagactgaggaaggagaatcgcttgaacccgggaggtgaaaattgcaatgagccgagatttcgccactgcactccagcctgtgtgatgggagcgggactccatctcaaaacaaaaaaagaaaaaggaaaaagaaaaaaagaaaaacctaggtatacttctcaagcaaataaaaataatcaaaaccaatatcatgcccgggcacaaatttcatatatataacagatttaaatatatgagggtgattatcctctcatatctccatttttttttgtttttccatttttttctttactaaaaaaagttaatgccaatgacacacaatttttttttttttttttttttttgagatggagtctcacttcttcgccctggctggagtgcaatggcgtgatctcgactcactgcaaagtctgcctcctgggttcaagcaattctcctgcctcagcctcccaagtagctgggaccacaggagtgagccaccacacccagctaatttttgtatttttaatagagacggggtttcaccatattggccaggctggtctcaaactcctgatctcaaataatctgcccgcctcggcctcccaagattctgggattataggcgttgagccactgcgccccgcctatgtatgattttttttttaattttattttcataagtttttggggaacaggtggtattttgttacatgagtaatttctttagttgtgatttgtgagattttggttcacccatcaactgagaagtatacactgaacccaatttgtggtcttttatccctcacccccttcccaccctttcccccggagtccctgaagtccattgtatcattcttatgcctttgcatcttcatagcttagctcttgaacccttactttctgtttgagggagaagacatatcatctacaagtagatactgtgtaaacattccattgcatgactatcccataacttatttattatttgtgtttggttatttgctgctatgtaacaaccccactcccaactaaatggtgtgacaattccatgattctgtggatcaaaaattctgaaaagtcaaacccaaggagttttgtctctgctccatgatgctaaagcctccgcaggggtgaggcgaatggctcagggtgactgaaaagctcagggttggaacagctggggatgaggcctctatgtataagatgattcttcactcacaggtctgaaactatggtggggacagccagaaggctcggctcagctgggacagtcacctgagccctacacatgacctctccaacatggtgatcctgaagcagttgggtttcttacacagcatcacacttttcttttttttttttttttttgagatgaaatattgctctatcacccaggctggagtgcagtggcacgatctcagctcactgcagcctccgcctaccaggttcaagcgattctcctgctccagcctcccaagttgctgggattgcaggcgcctgccaccaagcccagctaatttttgtatttttagtagagacggggtttcaccttgttggccaggctagtcttgacctcttgacctcaggcgatccgcctgcctcggcctcccaaagtgctgggattacaggcatgagccaccgcgcccggccaaagctcacacttcttatgattcagccttagatgtcacatcagttcattttccccacacttattagtgttagaagtcacaagcccacccatactcaggggactggcacacagaccccactctcaatggaaggggtgggacaccaccattcctgctgatgggcatttgggtaacttcctgtttgaagctattaagattgggctgctgtggccgggcgcagtggctcacgcctctaatcccagcactttgggaggccgaggcgggcggatcacgaagtcaggagatcgagaccatcctggctaacacggtgaaaccccgtctttactaaaaataccaaaaaaaaaaaaaattagctgggcatggtagcgggcgcctgtagtcccagctactcgggaggctgaggcaggagaacggcgtgaacccgggaggcggagcttgcagtgagccgagattgtgccactgcactccagcctaggcgacagagcaagactccgtctccaaaaaaaaaaaaaaagattgggctgctgtgactattctagtaggtgtctttggtgagcgcctacacgtgtttctctttttctctttagtatatgcccaggaggggaactgctggctcccagataccgtatgttcagggtcacacacacttccacagggttttccaaagcccttgtaccagcacgcactcccagcacctgtgtgactgctccagctgtcccacagtctcatcagttctattgctgatattttcattttagcttaagttatatttaataggaaaattaccgttgcctctgccccccgttcctgcctgtaggagtttctcgtagctgttgctacaggtggccacaaatctgtcacttaaacccacacaaattgatgtccttatggctttggagtcagaagtgtcaactgaaggtactagcagggctgtactgacctggtggcctcagggagcatctgtgctgcttctccaccttctagaggctgctgcatccctcgctccagccccttcctgacaccactcaccctcctacttctgttatcacatcctcaccttctctgtgttcagggctccctctgtctctctcttgcaagcacacttgggattccattgagggccacccacataacccaggagaatttctccacctcaatatccttaacaactgcagagcccttttgccataaaagttaccattcacgggttccagggattgtgacatgggtagctttaggagtgattattcctgcctgtctcccgctcaccagaacttggactttctctctcaacaggagccccctgtgtgggaatagcctgtctcaacgacgccctctataaggacctgcttcctcaaaggacctcatagtcgggtcctgcccctcagtgtccagtctgccttggctggaggggctgcaggggtgtgttggcgccacctggtggagacagggcatcacagcaggtgggagcccagtagaagcacaaccaaaacatgggtaatgtttaaaattttctggctaagcgctgtggctcacgcctgtaattccagcactttgggaggccgaggtgggtggatcacatgaggacgggagtttgagaccagcctggccaacatggtgaaacatcccctctactaaaaaatacagaaaaattagctggacatgtggcgcgctcctgtaatcccagctactcgagaggctgagacacgagaatcgcttcaaccccggaggggttgccgagatcgcgccactgcactccaggctgggcgatagagcgagactctgtctcaaaaaaaaaaaaagaagaggggaggcgaggggaggggaggggaaaagggggaatttgtttggagctgagacatccatcttctcctgacctcagatatttgcactcctggttatgaagccttcacacttggactgaatacaccaccagctttcccgatttccagcgtgcaaatggcagatcgtgagacttctcagcttccataattacatgagccaatttatatatataaattgggtcctccagaaaaacagaataaattatatatataattatacgcataacttaattaaattatacgtataacttagctatatatataatttattctgtttttctgaagaaccctactgacacaaatgttgagcatcttttcatgtgcttattggcttaataacttgtacatcttctttggggaaatgtctattcaagttctttgcccattttgtaactgaactattaatatttgtctttacattgttgagttgtaaaagttccttatatattctagatactagagccttatcagatatatttctgcaactattttctcctaatatataggttgtgtttttattttctttttctttttttttttattgagacagtctcactctgtcacccaggctggagtgcagtggcatgatcttggctcactgcagactcgacctgccaggctcaagcaattctcccacttcagcctcctgagtagctgaggttataggcacttgccatcgcacccagctaatttttgtattttttagtagagccgaggtttcgccatgttgcctaggttggtcttgaactccctgcctcaaagcgatctgtcagcctcagtctccctaagtgctggaagtacaggtgtgagccacagtgcccggccatctattttcaatagtgttttttgatgtacacaggtttggaattttgataatgttcaattcatccatttttttttttttttttttggttctttctactggaccaccactcttgagccctctaatccaacctccacgcggcagccagagggagctctctaaatgtaattactctttccctgctccacctgctcaaaacagtgtcacatttgtgatttaaaacagtatttctcaaacctaatttgcaaacaaagcaggtggaactcttcttgtatgcacagcatctgatttggttggtctggcatgggtctgggagtgagcacacctaccaagcggctgctggggtaacttgcgttttccactgatgatttcagcaatgtttccggtcccacatgctcctccagaaccttgtactcccccatgaaaaggtggagtccatttccccttcctttatttatttttttgagacgaagtttcactcttgttgcccaggctggagcgcaatggcgtgatctcagctcaccgcaacctccgcctcctgggttcaagcaatgcttctacctcagcctcccgagtagctgggattacaggtatgtgccaccacgcccagctaattttgtatttttagtagagacggggtttctccatgtcggccaggctggtctcaaactcccgacctcaggtgatccgcccgcctcagcctcccaaagtgctgggattacaggcgggagccaccgcgcccggctatttccccttcctttgaacctgatcaggacttgacgatggcatcaacatggtgagagtgaccctgcatggcttatgaggctgggttacacaaggcgatgttgcttctgactggctccctctcaggatacatgcccttggaacccatcctctaagctccttgggagcccaacttagcccatgtggagacaagacagggagagaaacagaggcacccccagccctcagccagcatcaaccgccagacaggagagcaaatgcgccaacaatgattccagctgaagcctcagacagcgtggagcagagatgagggatccctgcagattgcagatgcgtgagcaaaatgcatgctgtcactgttttgaaacaacaatgtctgggggctgtttgttatgcagcaatagacagctgtaacaatgctgttactgctgtattccatgaatgactgcactttgagtagcagggggctagatcactagataagccccatggcttctgtgtatgctatttttctacttttatatccttttcattcactttttttttttttttttttgagacagagtctcactctgttgcccaggtgggagtgcagtggtgcaatcttggcggactgcaacctccacttcccgggttcaagcaattattgtgcctcagcctcctgagtagctgcgactatagatgcacccccatgcctggctagtttccgtatttttagtagagacggggttttgccatgttggccaggctgatctcagactcctgacctcaggtgatccacccaccttggcctcccaaagtgctgggattacaggcgtgaaccactgcacccagcctcattcactttctttacttggctcatttttccttgttgcctcaattctcctctaagatcactttcctgacatttcagcctgggcctgttgccttctctgggtcccctccgcctcctgtgcctcccccatctcagccttgatccctcagattatacttcctctgtccccaccctgaccatcttggctgtccctggatagggatgggtatcttctcccactggtctgggagatctggaaggacaggcctggaaaagacttggtcactgctggaaggagctcagttagtgtggtgctgaggacagtacgggtgaggctggccccttcacccaaactcccactctcttccatagatttcacctctgtggcccaggccataggattagggcaactccccttaaacatcgagtccatcctccaagctgtccttttttttttttttttttttttttttgagacagagtctcgctctgttgcccaggctggagtgcagtggcgcgatctcggctcactgcaagctccacctccagggttcactccattctcctgcctcagcctcccgagtagctgggactacaggagcctgccaccacacccggctaattttttgtatttttagttgagacggggtttcaccgtgttagtcaggatggtctcgatctcctgacctcgtgatccgcccgcctcggcctcccaaagtgctgggattacaggcgtgagccatcgcgcccggcctcatgctgttcttgaatagtgagcacctgttacaagtcgccccaccagcctctcacttgtacccccctcatctctttctccccaagagacagaggaccctggcacttgtgaagcatgacccagaccctggggccatggcatccaacatcctcattccccatgacccctactgtctagatgtagctgccaagagacccccagactccccgggcctctgtctagagtgccaagacagagagagaatgccctgccgcttgcatgctttgtggggtgtccttcccccttccctggctgctaggcgtgacttcaacgttctccccaacccccaaacagcagcactgacaccagctgcagacctggctcaggttagctaatgaggaccaggctggggatggagcctgaacccctaaaccccagtcctgtaccccaccctaatcctggggtctccactggacaaaacgaagcagcttggtttttcgttgttattgtttttgagatagagtatctctctgtctcccaggttggagtgcagtggcgtgatctcagctcactgcagcctccgcctcccgggttcaagtgattcttgtgccgcagcctccccagtagctgggattacaggcgcgtgccaccacacccagctaatttttgtatttttagtagagacagggtttcaccatgttggccaggctggtctgaaactcctgacctcaagtgatttcccagcctcggcctcccaaagtggaagcggcttatttttaaggagaaaactcccgtggaaaggaatcagcacctcctctgtcaacatttcacttctctgaaaagactctcacttccaacagaaagtgctttgtaacacaacaatgaggctgggcgaggtggctcatgcctgtaatcccagcactttgggaagctgaggcgagtggatcacgaggtcagaagttcgagaccagcctgaccaatatggtgaaaccccgtctctactaaaaatacaaaaattagttccgtgtggtggcgtgagcctgtaatcccagctactcaggaggctgaggcaggagaatggcttgaacccaggagatggaggttgcaatgagccgagatcacgccactgcactccagcctgggcaacagagtgagactccgtctcaaaaaaaaaaaaaaaagaatgagaacatatggacacagggaggggaacaatacacacaaacaaaatttagaaacaggtgaaaataattttagtaatatttttactaatactgatatgctcaaaatattattatttcaataagtaatctaaaaattattgagatgtcttatgttcttttcatcatactaagcctttaatatttggtgtgtattttacactcacagcacatctcaatttgcagtccccatgtttcaagcactaaataaccatgtgtgtccggtggctaccatactggacagcgttgatctgaaatcgcatctgtatgcatcaccagcatatttgcagagatccccatctcagcagcacacctgaggctcatctgcgaaagcacctgcaacttctctacaacctcccacatcacctccaaacacatcctcatgtcatctgcaaacacacccatagctcacaggccaatgcctaaatatcattgcaggcaccttcagagaaagcacttactaaaggggtatacttgattccacatctgctttgacctgcaaatctcccttctcctttacatacatttgcatctcatttgtatgtcaatctaaatccactggcagagcctcagatcatcatctcaaagtcaggtggatgtggggctgggcaggcctccaggtgttcctcctcctgcttcctctggggctcttgatcctcctcctcttccttgctgctctcctcctcctcctccaatatggtgaccagttcctcccgcagcgcccccatctccagccccaggctgcacagctgtcccagcagctggacatccactcggcgcaggttcccctgccagtaggaaggggacgtcacagggatgccaccccagagagcaaggggtctctccaggacctgggtgagagcaggtcccaactcatgtcctggccacagcgcctgggcagggtcctcactgtgcccatggaccctaactgccttcctgcttctcagagtgtctcttgatctctaactcttctctttgtctctccatttcattgtccctgacttctctctctctgtctcctccctctcttatctatatctgtccctgtttccctttgtctctgtccccatttattttttgtctttccatgcccctgtctctctgtctttatgtgttgccatttctctgcccctgcctttggctctctttctctcgcttgccctctctctgccctccccaactttctcaaattcagtctgtctctccatctctgttcctgctctccgtctctgcttcccacctctgtccctctcttttgggatctccctgtccccacctctgttcccgtccctcactctatgtctgtctctcggtgtctgtacatgcctctcatgtctctgcttctatctctcagattctgtttttcgatctctggccttctctatttttgttcatttccattcattctcatttcctctctttctctttcccttccaaacccctcactcaccagctcctccctgatccacagcagactatcgcaggcacctccagtgtctgcccctgcagtcctgagggtctgaccagggatttccactggggagacctccctcagggcctgggggggtgggcccagccccggaggcaccagtccagcctgattcagctgcctccacagttccatcgtctctgagctatggctgcaaggagcaggaagtagcaaggtccagggtggcctggtcccctggggagctgtgtgcgtggtggagagtaaagggcagagggagtgggatgggggttcctgggaaaggtatcccaaagtccactcttcagagagaatcagctggccttgtgcttttctttttccttctgaagtctaacctcaactctgctcacagggttcaaacatagcctcttgcagaggtctaactccacccttccctgcctgtctcaggcctgacccctcaggggcgctcagtgtctgtagatgcctggcaccctctgtccttccacctgccccccaccaccacttctccagcctctcctcagcctccatttgacctctggcttgcccatagcttggtccttgcttgtcctcttggcacgggtcatcctagggctttcccaccagtgtgcctttgggggcaggaatggctcccaggggcaccaagacagcaatcccttagctggagtgcctgtgtccaggctgctggcctagggccaagcagccaattctgctgaccctggacttgcctatgggtatattatccctgttgagggtgagggcttctgctgtggaaaagtctgggaagcactgcaggcctctctcggccttggacccttccttcagacccaaggtgcatatatatacatatatataatggtagatcacgaggtcaggagatcaagaccatcctggccacatggtgaaaccccgtctctagtaaaacacaaaaaattagccgggcatgctgccgcgtgcctgtagtcccagctactcgggaggctgaggcaggagaatggtgtgaacccaggaggtggaggttgcagtaagccaagatcacgccactgcattccagcctggcgacagagcaagactccatcttaaaataaacaaatgaacaatatatatatatatgtattttgttttttgagacagagtctcgctctgtcatccaggctggactgcagtggtgcaatcttggctcactgcaacctccgcctcccgggttcaagcgattcccctgcctcagcctcctgaacagctggggttacaggtgcacgccaccacacctggcgaatttttgtatgtttagtggagacggggtttcaccatgttagccaggctggtctcaaacccctgacctcaggtgatctgcccacctcggcctcccaaagtgctgggattacaggcgtgagccaacgcgcccagccccaagtcccttttaccatagaaagtaacatagtcacagtgcccagggattcacaggtatggggagagggttcgttattcagctgccacacccaccttcctaaacctgctgcccttccagtttcctcacgtgcacagccacgcccgtctgcttttagtttctcaatctgttggcttaaccttcaaaacaggcccaggatttgagcacttctcaccattccctctgccccatccccattcatctcttgcctagactgctacagcagcctcttttactggtcccctgcatccacccttgccctctaaggcaagggtccccagtccctgggccaaggaccagtaccagcccctcgcctgctaggaactgggccgcacagcaagagatgagcagcgggtaagtgagcattaccgcctgagctccgcctcctgtcacatcagcagtggcattagattctcataggaggcaaaccctattgtgaactgtgcgtgcgggggatctaggttgcctgctccttatgagaatctaatgcctgatgatctcaggtggaacagtttcatcccaaaaccatccccaccccacccccgacccccagtctatggaaaaattgtcctccacgaaaccagtccctggtaacaaaacggttagggaccgctgctctaaggtacattctccacctggcagaaataatctttacaaaatgtaaatccgattttgacactcccttcttcccactgtgaatagaataaaaccctaccaggcctgcaccgtcagcccctgcccacctctcaacccagtctcctatctctgtctgcaagctggttcccacctcaaggcctctctgctctagaggctacctctccctgcagcgcttttcccctagatctttgaatggctctttccttatcattcacttctacttcaatgtcacctcttcagagaggcctttgctgatggccctacacccagtcacttttttttatctgcttctcatcaaaattgccttgctgattcctttgtttcttattcatcctctcccacatccatcctctcccagcccagaatgttgacttcctgagagagggactgggtctgtcctgctcaccatggtaacctcggcatctagaacagtgcctgccatcacgtggtaggtgctcagtaaatattcttggaactaatgaatgaataattctatccacaagacttcacaatggctcttcatgctgcgatctagctttcaactccaaactggtcttgagatctcacctcagtctctaaccttgacatctaacctcttcacccactctcttacctgaccctaatttttaaaaatgacgtggtcagcttttcagccccctcattccctgtttttaggaggtagtgagtggaagctggaagaataagaaagcttggggagactgcaattgcagtcaggaaagaaaggtactctgccgggaagaacaccccatcttctcctagggaaagattgtggagtcctggggtttgttttgtttttcaattttttgttttaagagacagcgtctcgctctgtcacccaggctggagtgcagtggcgcaatcacagctcactgcaacttcgacctccccggctcaagtgatccccccgcctcagcctcgtgagtagctgggaccacaggcgtgcaccaccacgcccggctaacattttattttttgtggatataaggttgccctatttctttgtggagataaaggctcccctatgttgcccaggctggtctcgaactcctggcttcaagcgatgctttcgcctcggcctccacaaagtgctgggttcacaggtgcgtgagcccgacctgtgtctcgttttgaagctcagggagagggcgctgtgagcaatccctaaaccctttaagagtaaaaagtgcgtgcacctttaagaggacggttagaaaacgcggggcgtggccacaggagaataagttcgcgctgaaccaggagcgtgggataagaccggccccttccggttacgaaaccttagcaagatggcggctccctgggcgtccctgcgcctggtcgcccccatgtggaatgggcgtatcaggggcatccatcgcctgggtgcggcagtggccccagagggcaatcagaagaagaaaaggacaatactccagttcctgaccaactatttctacgatgtggaggctctgagggattacttgctccaaagggagatgtacaaggtgcatgagaaaaatcggtttcgagacaaggagtggatcaggccagataagtatggccatttctctcaggagttctggaatttctgtgaagtgcctgtcgaagctgtggatgccggtgactgtgacatcaactacgagggcctggataacctcctccgcctgaaggagctccagtccttgtcgctgcagcgctgctgccacgtggacgactggtgtctcagccgcctctacccactggccgactcgttgcaggagctctcgctggccggttgcccccgcatctccgaacggggcctcgcctgcctccaccacctccagaacctccgcaggctggacatctcggacctccctgccgtgtccaaccctggcctcactcagatattggtggaggagatgctgcccaattgcgaggttgtgggagtcgactgggctgagggcctgaagtcagggccggaggagcagcctcgggacacagccagccctgtccctgcctagcctttagccctgtccccactcacgtggcttctcagcgggctgcatggaatgtctggtagctcaccacacttctggcttccatttgtcttcactcaacgtcagggtgggggagtggtgctggccaatcacaggagagagcgtgagttcccagtatttattcctggctgcccttggctaaaggtcacagctcctgtcaccctgtcaggcagccctttccatgcccctgttcaggcctggggaggtaaaggctcaggctgttagtagccgcagagagccacactcaccttgtcaggagactcttctcaaactgtccttatgtgagtgcactgccatttcttgcagggaccctgactgacacaggggctactactgacactttacagggatggttctcccccgtgcagggccgctgtgcccactgcaggacatgcagcatccttcgccccactccactcactaaaggccagcgcaccccaggccccatagtattgctggttatggatttattgactttatgttccaaattcagctttttcagttggctgttttttgaaaggggataagctttgtcagtagagggcaccgaacaggcattataggaggaaaggcgcctccttcgtggttcttgttggttgtgcttctgcctctggacgccgcagtgcatgtggcttccccagcacccagctcctgaagcaccaggcggtcagcagctgcccttggcaccctccagccctcagaagttgcgtaggagacacagcgcctccactgaggcacctctctgggaataacgttccccagcaccccaaatggatttccagtcaattcagaagcattttaccagtgaagccctcattattccagttcactgttaaagccagtaattctctatattaaactttccctgttcggtttatactccggagtataaaccgaacaggctatcagcacccctactagttctaaccacatgactcctcccccttatactaatagctagccaatcccacctatcaaaagaaaccacaacccgaaaaaaactatatattaccatactaatcctactacaactattcctaattataaccttcaccgccacc

SEQ ID NO: 735320 - DNA, 188303 bp, Homo sapiens
ctccaaggctgagggatgaggagacctgctgaggacccagggccttatctttccatcccactccataggtcccagtattgactgatgctgtcttcacctcctagcctcacttttaaccttctggcacccgcccaccactgtccagttcactattgaagccctgccgtccagtgctgcagagggaaaggatgttcttctactggcctgcaatatttcagaaactattcaagcctattattggcacaaggggaaaacggcagaagggagccctctcattgctggttatataacagacattcaagcaaatatcccaggggccgcatacagtggtcgagagacagtataccccaatggatccctgctgttccaaaacatcaccctggaggacgcaggatcctacaccctacgaaccataaatgccagttacgactctgaccaagcaactggccagctccacgtacaccgtgagtgattcccccatacctctgggtgctggcggtcagttctgcttcacacacatgagattgtcaggcctgggctgtgcctgcatccccctctgcattttgtcccgtgttgagatttgggcatttagtgcaggacacacacatggtaggtaaacttcaacagatcagaattcctttcctgcatccaggccctgcagacactgatggcgggggcgggggggcctcagcagggggaggtcagtctcagccaagcaccccatgccctccccatgaacctgaccctgagaaagaccctggagaactgggtcagggcctggcctgagggcgtcctgggaacctcacaaaagcccagcctcaggactcctgactccgtgtgaccccgggaagcctgtgtcagggctggggtgtggtctcctgggcagggcttactgggagcaaggatttaccagatgtctgcgggctgtggttcctgaagcttctcatcagtgagggctcagctcccagagtctcatctagacaaggacagagcctaccactttccctgggactcagcctggagagggcagggggacaggattactagggcattggccccctgaatgaggagcttaagagatgcccttgggcagtcagtggcccaggggtaggaacagaggggagaaaatgttcctggcagcttcttgtccaccggggatcatgcccaggggtgctctcccatggaggcaaataacagatgctgttgatgtgaacacctcctctgtgccaagcttcatgtcagatcctgtgaataatttaaagttcattcacagacaaagtggcaagcctcagaccattttccatttacatattgtatggaggggaaactgaggcacagagagatacagacaccggccacggtgggcagatcgcagctggcagagtcacatgagggctgtctgcagctgctgccacgtcctctccttcatccctggtgccttactaggtgtctgtggaccttagaacagccactggttcggatgttttcttcttaggtgtctacagctcggagggggagattctggtctggagagttatgagtaaatacagaattaatcagttttttcttaactaaatcacctgcctcaacaatcagtcagtgctggggaagttcaggcctcctcgctcaggtccacaccccgcatctctggacatgaaatggcttcgtgtgttttctgatgtgtgggtatcattccaacaggaggataaaggggaggactttgctttctctccccattcacaccctgcaccagccagggcccagtgtgagacacatactccgtagttctctcatgaaggagggagggaatgaatgaaggaatgatctataacctcttcagagacagagacctggatacaagatcctaggaggttctgggcccaacgtgagacacacactctgtagttctcttatgaaggagggagggattgaatgtaggaatgatctataacctcttcagagacagagatgtggatacaagatcctaggaggttctggccacacctgttttctgtccctctagagcctaagacccatgtctcattcatctggcccgtttctcctaaatctgcccctgggagctgagtctcatctgaccctggggctgcagggctgtgggaaggttttcaggggagggatcaggcttgcgggtagtcccacacgtttgccttacaccctggagctctacctggttctcactatgaatatcccataataatcccccctatcctttctggggagtagaaaaaaagtaaatatttaaaaatatgccagagcatctgttcttcttagcaagttcagatagttattagttagcaggaataaatcgttattttaccagagcctcacctgctgggggtttatgggagcctaactgactgaggggggtgggaaatatccaactccagccccctctagccatcatgtcccacctaaaggagagaaaaaactgagaggcacttgtgacattcacagcccagggcacagactctatccaggaccacagaacccctccctccccccactcaccaccgcatcactgaacgcctgctcacccaagttcctgttgcccagtacatcatgtcctggctttcaacaaaaactacaagacagactagaggcaaaaaaaaaaaaaaaaaaaatgcagttcgaaagacagaacaagcatcagaaccagatgcagatgtggcagggatgtggcagggatgttgaaattatcagaccaggaatttaaaacaactctggggccaggagcggtggctcatgcctgtaatcccagcatttgggaggccgaggcaggcagatcacctgaggtcaggagttcgataccagcctggccaacatggcaaaaccccgtctctactaaaaatacaaaaaattaggcaggcatggtggtgggtgcctgtaatcctagatactcggaaggctgaggcaggagaattgcttgaacctgtgaagcggaggttgcggtgagcctagattgtgccactgcactccagcctgggcaacagagcgagattccatctctaaaacaaacaaacaaaaaacaatactggctaatatgctaaaggctgcaatggaaagcatagacaatgtgcagaacagacggatgctgtgagcagagagatggacaggctaagaaagaataacaacagctactatatctatctatctatctatctatctatctatctatctatctatctatctatatatatgtatatatatgctagagatcaaactcactgtaacacctggatctcagagtggttgtgaggatgtttattaggagattaaagagattaaagcagagttatacacagggcgagagctcaactgatgctatcaactagtattcttatttttttgatgttgttattggcaataaaatcaggaacaatgcagtaaaaatttggttttatcatgtacgagttctgtgaccttccttgacttactgaggtactgtaagtctcagattctaactctgcagatggcggtgatgcccctctccctcaaggtgatgtgaggatgagatgagctgtaggtaggttggtgcccactgtgcctggcacatggaaggcccctgaaaatagtcaatgaacatcatccccgctcatcagcatggagttgacagtgagggctcgctctctgtgacaatcatggaatggaaaagaagaaacaagaggaagactgggcgcagtggctcatgcctgtaatcccagcactttgggaggccgaggcgggcagatcatctgaggtcaggagttcaagaccagcctggacaacatggcgaaatttcatctctactaaaaatataaaaattagcctggcatggtggcacaaacctgtaatcccagctacttgggaggctgaggcaagagaatcgcttgaacttgggagatggaggttgcagtgagccgagattgcgtcagtgcactccagtctgggtgacagagcaagactccatccaaaaaaaaaagaaaaagaaaaaagcaacagagggaagaggtgtgacatgagaggaagaagggatttaaaggtacaggagcagggcgaggtgcaagcacctgtgggagaatgtaggagttggtacatcccagtgtgtcaagtctgagacacagaaaatggtgcaaccgtggagagcaagggagtcagctatgaggacagcccaacagaccacactcaggctctggagcatttccttcctccctgactatgcccctgccctgcaatgccccttatggtttcccttggaacaaacttgggccttgtcccctttgccttcccctttctgcagaaaacaacgtcccaggccttcctgtgggggccgtcgctggcatcgtgactggggtcctggttggggtggctctggtggccgccctggtgtgttttctgcttctctccaggactggaaggtaccgcagcttttccccagcctcctcccacccctaggctgaccccagtcagggaggagggagaccccgccctgtattcagggccaggctttccgcatcctcccaaggaatccttccctctcattccatggctcctcccttgccagctgctgatcctaggctgcctcttcctttatgaatgtggcacagttaaggttgcacccctgagtgctgtcctagttccctaacacagcaaagccacagctgcctggagggaggaagggagggagggagggagggagataagacgggagtgctcagaacctggtaccttctgctgttcattgaatttacccacccagtgaggagggatttgcaggcttgagatccatggtgggggtcctgggcatggtcacgcagtggggagtggcaaagcctggacaggctgggtagggtcagcaccccatcgtgattgatgtccctgaggtgtgagatgggagaacctggacctcaggacctgctgtcctttatgtctcttgccaaggggtggagagagagaggacaaggccattgccccatttcagcatctccaggcctgaaaggagggtctggccatggcagggatactgagttctgggagaatatgatacatgctccttgcctccccatgcccccagctcccccagtgtcctgcacacacagccggccctgctttccctctggggccttgacccttcctctcaggcaaacgcaggtggtctgattccctccctgagtcctcagtccctttcctgggtccctgggtcaatgttctcctcacccggcatctgcctgggggggtccttcctctctggccaggacagacgtgactgcttaaggcctatcctcagctccccgtcctcggccgctcctaccacgaaactgatggagacaggaggccttcactccagtccttgaaaatggagtcccttccttgtcctttattctgcccctaaacctgtgatttctccctgcaccctcatgaataatcctgacctttcctagggccagcatccagcgtgacctcagggagcagccgcccccagcctccacccctggtgagtgtcccttcagcccaggtgtgggagcccctaggcctgccctacggtgtccactcctgccagtcaccccctgggggcctctgaccctttctttggggctgcaaggaggatgtcaggaaacatgacacaggggaccccgactgtcttgttcagactgatctgtgggctctgggtcgtgggtcacctcctcgacctcagctgctcaggtctcccctgggaagaggctccctctccctgattctctgggagctgaggacccctacactctcctgcaggaggggcccaggctctcctcccaccctgctgctcactcctgtctctgtccccaggccatggtccctctcacagatccaccttctcggtaagcctgttccctccccagcccttttctactggggtcccaacagtgcaggctcagggcagggggaccatcaaccccacagcacagcactgacccacctttccccagaacagtcaggtcaaagtgagtgcctccagccaggatccgggcctctctacagggccaggaccacccacgccatgtgctgacccctccccgggaccctctacacctgaggagaaccctggagtccagcaggtgcagaatggacactgggaccatcagtcagaggcccacattaacaagggtgcggggtgggcccagccaggacaggggtcagggtgttgtgtccacactgggaggctgagctcaggggcagagctggtcaatcctgaggggaaatgagtggaagtggaggcagggaagtaagtcctggccgatcagagacaggaaccttccaggctgggcttccgtgaccctccctccctgtcccctgacatctcctctctcccctgcccaggcccctctacccagccccagaacagccactcccatctatgaggtgagtgtgggccatggatgttctggtcccgcaggctccaggggacccaggatctgcccccaccagcacctggctgagctcagattcaggaaaatgcagtgaaaatgagaacaggtggtggtgagcagaggagggaggggcctgggaacagggaccccctgagcacagccaggttcagccccagagaagccctgggtgggcccagagcctgggagatgccagacactgttctgagaaggctacaggggttgaggcctcttctctgtttttacaggaattgctatactctgatgcaaacatttactgccagatcgaccacaaagcagatgtggtctcttaggttcctctgggagctgctcttgtgggttgatggagcgtccccaaagctcccagccctggggacggggaaggacatggagcctgagccagagaaccagctctgagtcctgaggagacacaggcctggggacagggagggatgggagtccctgctgaatatctggagaccctgacaggttgccctgggctctgggtgggccgggacaaaggcctctcatcaccacaggaagcgggggcttgcaaggaaagtgaatgggcctgtggcccacccggggtcaccaggaaaggatctgaataaagaggacccttcctctcattggctctttttctgctcacgggaacttagcagaaactcacctgaaactccgtgtccattctctcccgggtcacacagggaaaatatctccaccttgtctcaaccacagtctctcttccctgggaggcagaaataggggttgggagtcaggctggggtgggccctacacaggaaagggcaagattcacatgagccctgcccagccagccgagcgctcagctgtcctcacactaccccagggaccaaggccatgcacagccccagcctgggtccctctgtgaatgcatgtggggtctcaggagcacagaagatggggccatctgatgtccacaaaaggtgagcaatgcgggagcaaccatgggtggtataggttgcggctgtggcccctacgcagcctccagtgtcctgacccctgctgccctcttcacccaggccctggaggcccagtctatcactgtcctccacaaatgaacttacctgtccccaaatccaggatcctgtgtgcttatacctggccactaggttctcctctgtcccagtggctactgctcaggacatctttatccctggtggggcacagagaggggctgtcagagcaaccaagattaatacagacgcataattcagtccttgagcactacccaggactctggcccctcattgctcatcagttcccactttaccccctggcatggatctcactgagcaagccaactctttacacaggagcatccaggtcagaggtgcaggactcccccatctaaagctcatgcaggctcccatggcgatgggacaacctgtctgctcctctccctggcccacagccctatctcgcctgcagctcctccacacacctgggacagcagttctcagcccttccctgagggcccctggaagggtgatgatctcatataggttcacttgaaccaggtgccaccttcccacaagtgagctggtgcctgcactaaagcacagagccacagttcccaagagtgttctgccactgccacaggtcccaagagtgttctgccactgccacaggttgttcgtcctgagatgagaggtaagaaaacaacccgcaatgggttgttttatatcgggatttgcatcaggatttagctctaaatgacccctgatcccacctgcacacagcgtcagatgagacaaggtgaggcctctttagttttctgttgaggctgtgacaaattaccacaagcttagtgacatagaaacctgaaccaaagtgcccacatggctgtgttctttctagaggctccagggaagagtgcatttcctctccttttccacctcctagaggcctcctgcaaccttggctgtgtcctctttctccatcttcaaagccagcagcacagcatcttgaaactattctgtgccctgcttccatccccacatctccacctcctcccacctccctctctcacttaaaaggaaggagccttgtggttattttggacgcacctgggataaaccacaacaacctccccatctcatgatccttcctttaatctgtaaagtgtcctttaccacgtgacatgtccacagatctggggatgaggatgtacacatctttgagaggcccttgttctgtccatcactcctctcaaggccatcttctcatcatcgttcactacaaactacacatgggcacctggatgggttcatcatgactgtggcgtcagttcctgcattaacatccccagcaccctccagatcctgagagagggagacggagggctctccatgcccctagtacctctccaccttcttcttggtgacatgcttagttgctaagaataacagaaagcggaggtgactgaaagatcacaactcaccggcccttcaatagttcgtggacatcagcaccacggacagtgactcagtgaggctaatttccaggtggcagcagggagcatgcagataggagggaactgcaggaaaagctgcccattctattctatatgagaaagagtgtaagaaagaggaagctattacagggataatgctattcttctctaatccataaattgcgaaacctttgcatgtctggatatcatggtttttagcacatctgctgccactccctgcagggctgattgctgcatccaggatgtggtctcttggggggctcacagcctgctttggcctcatggtgagtctccctgcccctgacactcaggccactgtctctgcctacaacatggtgggaaccttccatgattaacgtctgattctctgtgcctgacctttgaagcacatccatcactcagcctggagcatccgctgagctcagcatcctgctcctccatccccagctgagcccttgaggagatgcttgagaggatctcctgggctcctctgtgagctcctccaggctgagccttgtgcttggtgtcagaggcctttgccatctgcttgttctttccataggcaaataatcctcctcagggacaagtggggcctgaagatctgtctgaatatctatctatctatctatctatctatctatctatctatctatctatcatctatctatatgtatgtatatatgagaatgctttattaggcaaaactgcatactatgaacatgctttaaaatgcaacaggatgagatgtgaagacataaagaacaagtgtgtagtgacacatggctatcagaacacactgaagaatccacaccgcggccgagagcagtggctcacgcctgtagtcccagcacttttggaggctgaggcaggcagatcacttgaggacaggtgttcgagaccagcctgaccaacatggtgaaaccccatctctactaaaaatacaaaaaatttagccgggcctggtggctcatgcctgtagtcctggctgttcgggaggctgaggcaggagaattgcctgaacctgggagacacaagttgcagtgagctgagatcgcaccactgcactccagcctgggagatagagtgaggctccatctaaaaacaaaacaaaacaaaaagaatccacactgcttccccgcttcactttacccagaaaaggaatgttctaggccacttcctcttcagcacacatccccagggaactaaaataggttcacagtcacccccatcttcctcattcccatcacctcttacccacagaggcatctctggtcctacagatccagccctgccttcaagaggcacaggtccaacccatccagtgtccctgctagtcacacacagcactcagggtacaatggagggcttctgtgctttggatgggaacaaaccccacctcacattcccacacctgagaagccaccagggtcctctctgtcctgtcctcacactcaatgtctgtcctgggtcacccttgtcatctctcctggaaataggcatggctcctgacaggtaggattgaggctttgtcttttcaggagtccctcccactctgagcacatgaaactgctcagctccatgcaaccctctctcaccaggggccttgttctctgggtccctgaatacctgggtccatgccatgtacattttaagaaaaatgacagtgactctcaccctgacatcctcacccaaggcacgtgtctgacaagaatcaccaggtgagatacctgtggctccacacacctgaggcttcactgcgcaggggtgtcctcatccctctcctcccacccctagggacagtaagcaccacaggctgccttggaccaccagctccccctcccagacacagcctcagatctatactgacatgctacatggagaggctctgatgaacagcaggtattaggaaatcccaccgaaccaggtgccacttgcggccccactcctcctcatatctgtgactgggacagacacacataacacacctctgttcaccgcccagcccccaaggtcaatcacagtctgcttctcccctagatccactgctccccatgtcttccgtcctcagctgcatcctgggtggcctccttgctgttcttgtaccccagaggcaggttccaacctttgtgatgttgcctgcaatgcccaaactttcccttccccttccccttcccttttcccctcccccttcccctccccttcccctccccacccctatcccttcgtcttcccttgtcttcccttcccttccctataaagccaaacatacccatccacctaccttgtggtcaaagtcatcagcctcctgctccactcagtgttctctgaccctgcatatggaggtggtggcccctcctagaacacccaccactcactgtcagccttgcgtggtaatcacagattttgcaggggttacctgtgttcaggtgtgtcacctgtggaaccagaactcttggaaggactggcagagggagctgcttaggatatctcagggctcctggcatctggtctaccacagggctattaacaacagcacttagggacaaggtggaggatggacggttaagagggtaaatatggatgatgtgtgggcaaagaataggacacaggaacacatgcagtactcaaataattatgccaagaaaggtgaggacatggagatggacattcccatatacttctgatgggactgcagtttagtccctacagcaacattgacctcatcatgtttaacgcgcacacgctctgaccactatcctacttctgaaggcctccctgtgctgtgagctctgagaaggccaagcttgcctgttctgtctctgctaaagccagagaccagccaatagcccagcacagggtacttcataaatacatgttgaaggaatgagctccaggaacagtactccacatggtagagatgtgtgtatgaggatgttcactgcagaaggtcatgtcaatgtgacaagtgacgagcagcctcaaatccagcaacaggggtgtgggtaaaagatcatagtgtagccatgcaatggaaccaatgaaaaaaccacaattagagcaaatccacatgtattaataaaggaggtgccctccatacatgctgcacctaacagaatgttgccaaataagaatgaaaaatgatgatatttgggctgtaaaaactagaagtcagctaaataagaatgcatcgaaagtatttgtgaatgcttacaattttataatgccttggcatccgttttggatggaagttggactttctcataccagaagcagggctcagtcacctttgaaatagtttccagttctccacctccttccagttcctcagtgtgattgatcagatatctgatttatacaactgcctcctggtgacctcctccctatgggacttccggatacagcccgtatgactgccccactgaccccacaccctgcctgctgcagtgaccacctctaattacctggatctcatgtctgcttgcattaaatccaccaattaaaactccctgaggacaatctgtttgaataatattctgtaccctaataaaggccttgacccatgggttccccctctgtcctccccatactgcccctgacctctgtgtgtgtgtgtgggtgtgggtgtatgtgtgtgtgtgtgtgtgtgtcctccagacagggcctgtatcccccaggacctgtaagtaataaatctttattttcatcttatgtctctcgcaatcattggcaagagctctgcatcttaaagatcgcaaatttaagaaattggtgtagtcggcacaatagagtacctcttctgtttagcacaagatatctcggagctgctgaggcttttaacatcctcgccggtgtggctgcctcactggtgaggccgttctgttcagtgcaattcagttgctccactgtgtgctgctgtgttgctgctgtagagtgctgccatgttgttctccccaaattgttaccgagtaggaacctgtaatgtgctcccaaggtggtctaccccatgagaagggggattctccatctagggcaagggctaggtgtgtttctggaatcctaatagggaaggcatccacagagggtgaactccactcctccttagagtgaggagtgacatttcccatttattttccccatggaggtgccatgtattgactttttctttcactgtcccaaggttgagccaaggtgagctatggagaccagggcaagataccatttctgttagcaaagcaaatgggtgacaacgtgtggagaagctgtggttctcctgatggatatagcagagtgccatttagtaaaatcttgtcaggaggctgcccctggttagaccggcagtgtctgtagtcactaaggtggatgcgaattttaggccctgggccatggataatccctgcagacacagccgtggcttcatgtgatggggcaatcccgggctagtggctcccttgtttctgcatttcttgctgtggttgcacaatcaacacctcaggggttgattgggtcaccttggaaagagaaacagctgcctaggaggctggtgcacatggaggccaccctcaattttattctgctaacaagttgtaagattaaaacaacagggggctttgggtaccatcaggaacttgtcaagtaaacatccaaagacagaaagaagaaaaagaaaaagacattaaccgtctagaaatacaagccattttaaagattttgcttaaaagatgcgcttgggctgggagcggtggctcacacctgtaatcccagcactttgggaggccaaggtgggtggatcgactgaggtcaggagttcaagaccagcctgaccaacatggtgaaacctcgcctctactaaaaatacaaaaaattagcagggcatggtggcaggtgcctgtaatcccagctacttgggtggagaatcgcttgaacccgggaggcagagacggcagtgagccaagatcgcaccactgtactccagtctgggcgacagagtgagacttcatctcaaaaaaaaaaaaaaaaaaaaaaaaaagacgggcttgtttcgtcgttgtggagtcatcccagagagaggctactccctagagtcactgaccacctttcctcctccatcttttcctcttatcattctagagacagaaaacaagaatctcagctttaggtggctaacctcaccccccaagaaaagaaactaccactttgattgactacaaatccaagaaaaataaaagagaaactttaaaaagtactgagcaaaccacaggtctagcaaacataatgctagccctaggttacttattcatttacaacaaacccctagatataggaggaaaaaataaaaggtaattaaatatatacacatacaatattttaatataaatatataataaatagttaaattatgtatgtataatatgtaactaaatcaaagtaaaatttcatactttgattctattggaaattcaaaattcatttattaacttatatattaaggaatttatgtaaaaaaagatttttaaaagggcaccaatttgcttttgtgtctctacaacataggatctaatttaactttacatttgctaaatacactaattgacaaatattcatggatttaatcaatactggggctcaaattgtagccacacgtgggaatcccataaatttaaacactctgtccctattatcttgagaagaaaactaaatataaaattgaaaaaaacaggtatgtctcaatttacctgtaactttgcctaaatttcccggagtcatatacccattgctgtaaaacattctctattggacataggtgctctgagacaataaataaaatagaagtgtttttggtacttagacattggcttgacaaaatgggatcccatgaaacctcagttaagatagtgaatacggcccaatgtgagttgaaatggggcctttaaggattaaaacttattacatgaaacctagtaagtaatggggtgattatccatactgcttctccatttcatagcccaattttgacagttgtcaaatctggaaaaaacaaacaaacaaacaaaaaaacccctgggaatctgttgcctcacagagacacaaagtagacatcaaaattgtatatctcagttccagttccaaaatggtggcatagaagcaagctggctttactccttcacacagaaaaccaaaaacaaatatacagcaccaaaattattaccagatatattccagaactcaaatatgaaaatgaaacagttttcagagccacagagaagtgaaaaaaactcccgacagatgacaaaagaatcagatttccccatctgtaatgtccctccctgccccattctgcctggtaccaggtgtgtggaaaattttaccccaactcatggtttctacactgggaaatgtaagatcaatgcgggcaaccagtttctgcacaatcctgggttccctgtccctgccttaacccacaagaagcattgtgagtgcccgaagggagaaatttccctgaggacagtcaaagagtggggaggcaggactaccatctccttccctggaaactctgctgtgtaactcagccaagggagacatgaaatcagactggtgtttcagcagctccatgttgtagtaggtttgtttcacaggtatcctgggcatggacatctagccagctttcccacactgccaggatatcccctttgggacctccctcagttaggaagggcacactctgatcatttactagggccaaggtaaaccctaaaggtaacttagagatgaaaaggaggtagtgacctagcagtaaagaactctaagaaaatctatccaataaaaatcaaaacaagccagacaaagactaaaataaataatgaatccttcaatgtaaagacctggacttacatccacaagaaacagtaagcaggtaaccatgatctccccacatggacaaagtgaggaacaagtgactgatcctgatgagatggtgatgtgtgagctctctaatcaagaattcaaaactgcagttttaaggaaactcaatgatcttcaagaaaacatggaaaagcagttcagaaatttatcagagaaatttaacgaagggattgaaataatttaaagaaaacaaacaggaatcttggaattgagaaatatatttgctgaacaggaaaatttattagagtctctcaacagcagaatggatcagaggaaagaatcaacccaaataagactcccccaaggcataaaataatcgaattctcaaaagtcaagggcaaagagaagattttaaaacagaaagagaaaagaagcaaatggcataaagaagctccaattctgtggcaacagattttcagtggaaatcatacagaccaggagggagtgacatgacattctcaaaatgctgaaaaaatattgacatttgagaatactttatccagtgaagttatccttcaatataaaggagagagaaagtttcctagacaaacaaaagctgagataattcacaccatcagactagtcttcctgtaaatactaaagggtaaatactaaatacttcaatgtgaaagtaaaaaaaaaaacactaacatgcaaaacaaccacaacaacaataacaacatttgaaggtataaaatccactggtgaaattaagtacgtagacaaacccagaatactcaaatagtaattgtggaaagtaatccaatcataactctagcatgagtctcaaaatataaatctatcaaaaacaataatacattttaggaggccaaggttggcagattccttgaggtcaagagttcaagaccagcctggtcaaaatggtgaaaccccatctctaccaaaaaatacaaaaatttgcagggtatggtagcacatgcctgtcgtttcagctatttgggaggctgaggcaggagaattgcttgaacccaggaggtggaggttgcagtgagctgagattgcactactgcactccagcctgggtgacagagggagactctgtcttaaaaaaaaatagctacctgtttggagaaaggtaatataaaatatgtaaatagagacaaagtcaaaatttgcaaaggatgaaattaaagagtagagtttttttggggggttttctgtttctattattttatttgtgatctaagataagttgttaccttttcttctcttgaagatactttgttatatctatgtttttggaagtcttatggtaactgcaacgcaaaaaatctatgatagatccactgaaaataaaaaacaatgacttaaaacatactaccagagacaatcaaccacaaggaagacagtaaaaaatgaagaaaggaagaggggagttacaaaacaaccagaaaacaggcaacaaagtggcagtagtaagttcttacttaaaaatattgaacactgaatataaatggactctattctccaattaaaaggcatagagtggctgaatgctgcctatatgctgcctacaagaaaccacttcatgtaaaaagatacaaatagactgaaagtgaagggggtggaaaaagatatttcatgcaagtggaaaccaaaagagagcaggagtagctatactgatatgagataaactacaaatcaaagactataaaaagagacaaagaaagtcactatgtaatgataaagcgctcagttcagcaagaggagatgccaattataaatatctatgcatccaacacttgagctcccaagtctcccaagtatttaaagcaaacaatagtggatctaaaaggagagatagactgaatacaatattaattaggggactttaacaccctgctctcagcaatggccagatctttcagacagaaaatcaacaaggaaacttcaaagttaaactacacactagatcaaataggcctaactggcatttacgggacatttcactaactatctaactgttacagaattcacattattttcatcagcacatagaacattcttcagaacagaccacatcttaagtcccaaaaccagtcagaataaattcaaaaaagtttatatcacatcaagcatttgttctgaccacaatggaataaaactacaataaatgaataactttctggacacatacaacctaccaagatggaagcatgaaaaggcagaaaaacccaacaaaccaacatgaaactgtaacaaaaggaaaacccaggaccgaatgacttcactgctgaattctaccaaacatttaataagaactaaaaccaattctactcaaaatgctttaaaaaattgaagaggatggaacactttcaaactcattctacaaggtcagcattatcctgataccaaaaccagacaaggacaggacaaaaacaaacaaacaaacaaacaaacaaacaaacaaaaaaacactacaggattgcttgaggccaggagtttgagatcagcctgggcaacatagtcagaaccaatctcttaaaaaaaaaaaaaaagaaaaaaattagccaggcatggtggcatgtgcctttagtcctagctactcgggaggctgaggtgagaggaccaattgagcccaggaggttgaggccgcagtgagccatgtttgtgtcactgtactccagcctggggaacagagcaagatgctctctcaaaaacaaaaagcaagctgggtgtggtggctcctgcctgtaatcacagcactttggaaggctgaggtgggagaactgcttaagcccaggagttcaagaccagtctggacaacatagggggactccatctctcaaaaacaaccaaccaaaacaaagccaaaaaagaacataggccaacatcactaacaaacatagatgtaaaagtcctcaataaaatattaacaaaccatgtttagaaacacatcaaaagagatcattcactatgattaagtgagattcatcccagggatgccagtatggctcaacatatgcaaatcaataaatgtgatccatcacattaaagagaaccaagaacaaaaaccatataatcactccagcaagtgcagaaaaggcatttaataaaagaatgggttgagggagtggagcccatagtcagagcagcagtggtctgggattttggaagtagaaagaagggcagcaccactggccaggaccaccagggaacacccccataggccctgggtgttgtgctccagggagggttccctctggagttattaatcttggtgtccactttgcccagctgcccctcacagggtcagggaggatgaagggaaagcttccttctaatgaaagttcagggactcacagttcctagagcctgtagggagaggaagatcttcgaggaagagcacctgggcattggggcgtttgagaggaagatctatgccaggtccaagtggacaacctgtggactctctctccagggacatacgggtatctgggaatctcctgtagcttaaagaggtaaagacctctccctttagcctgaggactggaggatgctggttcaggtgaatgagtcctgcaggggctggtacaggcctggagggtggtggtgtccagggccttgggttcacccttagcatgattcaggccgggcggtgtttcacatgagcaagagggcctgggttcattgcttcaggacaatggtgaaatctcatggtggaagaaatcttgtccttgccagtgcccagctttcatttggtcttggcccagagtgtcctccctagagaagactcttgtcccttcttcacactgcccttcagggatatgccagccttatgggataagatggggtggagactgtagatgtgggtgggaatctctccacagagtgctccttctctcagcggttgcaccttgtctcagggcttcagcttgaaatctgggatctccaagcccttccctccccagtcctggccaggaccacatgggcagatgcattgtgtgaagtgcatttcatttggggtgtcctctctgcatggcaccctcccgttgattctctttgcgcatgtcagagtgcaggcaccatccacacctcctgctggaggagggacggagctgttgactcctgagagctgatcatgtgttcccaccctcacacacaatcatggtccatcctctgagggacatgtgttgccaccactgtggagatggtgcaactgacagtaacaaacagtaaaatctggtactgaatgggaccttaagccaacaatgacaatgtcattccaaggtgtttcatttttattgattcaatgcaagtcacctgatttcattgactattcacaatagctcgataaagtaaatgcatcatcaccaccactttaaagaggaaaaaggtgcttgggcagtttgtgactactgtggtggctgctgcattgctctctggtaaagccaagtaggtggtgggtgcggcctctgggctgggatgatccaccctcctggtggtggcaggggagccaagctggagccatggcctgtgcagtggtagcagctgaactgaccgctgctgcaggatttgcaagctgttacattttgcgaagccatgaagcacataaaacctcaagtagaacaagtgtttcaaagtctaccaaaatctgccttcagagattattactacagaggtggatatgaacccaaaatgacaaaacgggaagcagcattaatactagataatgaatgaacactagtaatagtagggtaagccctactgccaataaagaaaaaaataagagatgctcattaacatgttatgctcttaaatcacgcagacaaaagagggtctccttatatagtagccacaatcaatgaagctaaagatttactgcaagatcaagctaaaaacagtaggtgtataatgaatttttaacttcatattagtttatgtatatgaatatcaagtttttataataaaatgcctccaaacaaagaatatttgatttagggtttaataacttctaagaggggactcagatgtttcctgtttcacagtcagtctgagagggtcatttttcctggagctgacctgggtggaggcctcacactgatactccccagcatcctctctcctgatggggtttatgctgagcatacagtggccctgggacagctccattctctccatgagtcacagacgctggtcatggaagatccactggataaggttccagagtcatctgtggggcaggtcaggatcacaacatccttttcttctgtgactctggtgttgctgactcagatggggtcggagccactgaccctgtggacaatcagtggaggtgctcaactgaaagtgggctgagggcacgtcttctcctccatccctgggtccttaaggtaactgtggaccccagaccaactgacacaggagctagaaagaaattatttaggaagttagtgagggtaagagcgtccttggcaaggtttcccctttaacaaaaagcagcccaagataattccttttctaacaaagagcagcctgaaaaattgagctacagatgtagatgagcaagatggaagcttgcacaggtgaattccagtaggtgtgccaatagaaaagggctgcctggaagccaggtatgttcaacatggagactccatcctcccttttctccattaccacatgtacagtaaaaaaccaggcaacatggcaccggccaggtagacaatccatctgcatgacaaaagatcagagtggggcagccagcaaatggcacagctggtctaaacaatctttcaccccctgtataaatcagacactgcctcctgaagctcatctataaaaccttctgcatttcactatggaagtggcaacccattttccccaggacccctctctctgtgcagagagctcttctctttctttcccctatgaaacttccactcttaacttcactctgggtgcctgcatcctagttttccatggccatgggacaatgaacctcgagtattaccccagatgaatgatgctgtttcacaatcactggttcagctcccttcttcttagggtttcacagctcggtggggagaataccacgcctcagtggtctggggagtgaggaacaaatgaagaattaatcagattttacttagaacgctatcacctgcctcaaccatcagatccatgttgggaatgtccaggcctcctctcttagatctatacccacttcactggacctgaaatcctgtgtttcccgatgtgttggtgtcactcctatgagaggataaaggagagaactttgctttctctccccactcacaccctgcacaagacagggcccaatatgagacacacactcgctcagtagttctctcatgaaggagggagggagtgacctcgagtgattctgccatctgtagtctgtgtaccctggccagtggctgtatcttcatatgcctcagtttcccctcagtaaaataggacacacaatgagaactaaaaataaaattctaattccccagtgaactgaaaggatggcctcttggccaagcggatcccagagttcctgatcatgacaggatgggaggttacacctcattacagcccctccctttggaagtttagaggtgacaactgactagcattaacgctaaaatcgagatcatgagactgacagaacagactctctgtggccataagataccaaattataaactcaacctaaggtcatgcaggcaagggctaagccacactttcctacatttaaagaataagctatgttctaacacagaattttctttctctctagcggctaaagtaacactagccttcgagataagcaatattgaaatgatcgcggctcatccaccaacactggctaactgacccctgttccaacagccacaactacacttcaattggacaggagactgatttcagtaactttctcctaataagagaccactgagcatggcctggttctgctggtatacagacacggtgcactgagtaccataatgcttgtttcatcttttgatgtataagacctaatttaatacatttaaatctgaattctccaccccaaagtgaacatggggtgcatgtagcatgcatgtttgttgatcacgcatgtgcgtgtacttcctttgtgagtatccatagctccacctataacctgttgaatatgtatacctggccaactcattcagcataaatctatcttccacattcccctcccttgaagtgcctgctattggtctctgctggaggctgcatcttctaccctggggaatggccagcctgcaggctgtaaccctgtgtaagaaataacctggttgggtgcagtggctcacacctgtaatcccagtggtttgggaggttgaagtggtagaatagtttgagctcaggagccagagactagcctgggcagcatagcaagatcctgtctcttaaaaaaattttagggaggagagtgaggatcagaaaaaatacctattggctattatgcttagtacttggatcatgaaataatctgtataccaaacccctgattacatatataacaaacctgcatgcgtatctttgaacctaagataaaagtttgttttaaaaactatctgggtgcagtggtgcatgcctatagttccagctactcgagactgaggtgtgaggagtgcttgagctcgggggattgaggctgcagtgaattatggtcccacctgtgagtagccacttcactcaaacctgggagacagagcaagaaccggtctctaaaaaaaaataaaaatagaaaaataaaatgaaaaatatatgaaataaagtctcctttccaaacgtacagatctccgatttttctgccaacaatgataaatggtcagtggcttgccatgttgtctgtgaattacttttaaaatattcacgatcacctgacctaaaggttggtaccaaggaaccgcctgaatacaccgtctctgattatttgcctccaacagagtgttccctgggcctgatctctggtggacaatgagctgctgggaacatcctctcttctctattcctcccctggggatgctgaccttcccttggagtctcctaagttccccagggcagtcggctaatgtcctagggagcttacctgtcttctccataccaagtctcatgtgaaggacgaggctttgcccttgcccagatgaggctctgggggctgagccctggctggctaccagctgcaagagccatggcccttggacagctggtaaatccttgttcccagtcagccctgcccaagatgcctcaacccagccccggcacaggcttcccagggtcacatggagtcaggatcctgggacaggggactggacaggggtttccagggctgagtttctgaacaggggcttcccaggggtcccctcactccaggatctgacatggtcctacaaggaacgtccatggggaggggacccaggagggggaactgacactgacctccccttactgagcctccccccaaccccatcagactgtccttcctctgtagcaagtgcctgcagggtctggatgcaggaaagaaattctgatctgtggaagtttgtctcccctgtgtgtgtcttgcactaaatgtccaaacccccaaatgggatgtaatgtagagggggacacaggcacagcccaggcctgaaaatcctgtgtgtgtgaagcagaactgacccccaacacccagagctcatgagacatcactgtgtacgtgaaactggccagttacttcttcattcacaagatctgtttttatgacttgtagggtgtaggatcctgtgtcattgttggtgacattctgtatcagcagacatgtattggggtatattgtctctcagcctctgtggcaggtcctggggtaattacttgagttcctagtacatatcctgtaattcccctttgtaccagttgtagccaagcctaaggcagattgtgggtgagtggaagaatctccttgccttctgcagcttcaacagtgacttgggcagtggtaggcaagttccagaaagttaaaagtgaggctaggagtggggagagagcatcagttaatactgggccctatgcattgaggtggaaagatggggccctaggtcctggacaggtctcttcatccctcagccttggagtgtgtgtgtgtgtgtgtgtgtgtgtgtgtgtgtgtgtgtgcgcgcgcgcgcgtgcgtgcgtgtcctactgggccaaggtcagcagcatgacctcccttccttcagtgcctctgaccttggcatttccctgtttggagtccttttccccaggggtctgcctggctccctccctactgccttcaggtcctgctcacattagggcatccttgggagaccccttccctgacacctctagagaccctgggtcttccctttctgacctttcgctgctgtgttccctccagggctcttgtcaatacttgacctcacattctagatacccttgcatgtctgtcttcctccctatgagagcatgagctctgtgagaacagggacttgtgtgatcttggttgcaccccagtgcctgggacaggctgcggactcctgtggatgagctcatgagtgttcccagggcccttcacaacgtgggatttattttccaatggctgaggttgttggctaagagctctgttggagttcaatcaggctggtgggaaaaatattagagatagttatagagatagacacaaatcttcttggaagaccaaaaagtttgcataactttggtaatagatctgactgaaggtggtccctttacctttagttaaacaaattaaagtagtaacaaaggaaggcagagtagtttgtctagccagcttgtttactcatgtgatcttaagactaaccattgatgtgccacaggtgcttaattgctttctacttgggaagtccacaatgtcaattaccctctaacggtgttgactcaagcctttgttaattaatcttactgaataaatatgagtctcactagctgatcaaggccatggtcacaactgtttataggactcagcagggagtctgtaagcggccctgacagactcagctggactggcaaagcaaaatatgtgtgtgtcagtgtacactattcacccgtcccccacagctggtgcccctatatgaggagtgctgccacagagctctgtttagtgtcccttgttttttttcttgagtattaccccaacttaaattgtgattattgtcatctgttttcaacattaactgctcagtgatgattcacttggaaaacattaacaatcgagattgtttcttcactaacaacctcagattatttagattttcctgttgtaatcccttcttcctgtttagtgtccaacagaagccctctgtccctctcaggtccccgttctctccaagaaaccccagccagtctctgtgctccctcctcccatccactcccagggagccctcccctcacctgtgagcagaagcgcctgccagggatgtgcactctgtgaggaggggctgagggaggccccatgggctctgctgtctgctttgtcctcctctgtggagaggagcttgggcttcagaaaataaggaggccagaaagtaaggaacaggctgagaaataatggggatgtgtcgaaaggtcacagatgccaacatctttgtcctatgcaatattatccataaaattacaggtttgagatatgcttaaattttcttctaacatgcattaaaataaacatataacttttaatagttatattaaattgtatttaatataaattaaatgctcttgtcagagctactgtgactgtcagctctgctgtccttcctctctctgtgctaagcctcctcccagggcagaagcacttcccagggccaggggtgggggcggggaaaggtaagtggcaatgaggatctgcacaggtagcctttccgcctcctcccctctcagtcctgcctccttgtcttcttttcctctttttctccaatctacatttcagttccttagaccacgctgtgagaagcaaggcttattgggacccccatcccttaacaggatgacctgtgctccccataagtgacctctgctgtgtctagggattggctctgtcagcacctcacagagagtccctggggcccccaaactcagtgttattttctctatgacacagaaacccctctgggtatgcaaggttttcctcatgttttctaatgtctgggaaggttggatttactcccagcagggaggtcacagagatgtccagggagtggggtcctagaaatggacaaatctagagctaaagcccaggtctacgattttcagttgtttttttctgcagtgctatgtgaccctaatttcctaggagtaactaaaatgcaaacctcagacatttgtagacattttatgatttttctctacagcttgtaccactgttattattatttgctttatgctttttcctaaataaatttactttacaaaacatccttgtcctagtagggtgcaggggctcacgtctgtgatctcagctgcttgagaggttgaggtgggtggattgcttgaggacgggaatttgagacaaaacatctttgtcctatgcaatattatccataaaattacaggtttgagatatgcttaaattttcttctaacatgtattaaaataaacatataacttttaatcatcatattaaattgtatttaatataaatttatatacaatacatttttatataataaattatatatataaatgtatatataatagtttttcttttttgagatggagtctggctctgtctcccaggctggagtgcagtggcacgatctcagctcactgcagcctccgccttctgggttcaaacgattctcctacctcagcctcccgagtagctgggattacaggcgcctgccgccacgcccagctaatttttgtacttttttagtagagatggggtttcgccatgttggccaggctggtctcaaacacctgacttcaggtgatatgccgcctcggcctcccaaagtgctgggattacaggcatgagccaccatgcctggcctatatattttatataattatataaagttttctataataaattttatataataatatataaaatggatatttatttaagataaagttattagttttatatatttacatatatttaggaataaatgtgttactgtgggagcccagtgcccaggcaggtagtcagtacatgatggttgtcattagggttaatactttggaattctggattttttcccaagagagtgtctacgctggaatattgggcttgtggctttctgctgatgtgcatgtgtgaagaagctacttccacttattaggacttgtgtatctgtctcgcagtttcactacctattttctcgtgatgttggtcaagtcgcctaacttttctgtgcctcatttacctaatttgtagaatatgggtaacagtacacaagtgtgagtgtgtatttcccaggactgaccactagagggcgtgaaggcaccggcacttactattacagcaatgggtgtagtagtgctcatggtcgtaaacatcattctcccatgaaaggaaccagggcttcctgggagaaataactgattccagggctggggccggaaagcacaagcggagcctggagcatctcgtgaggccagaaagtaaggagccggctgaaaaataatggagatctgtcgaaaggtcacagatgccaaccagaaggagctttgaatgaccaattttgagacaaaatgagcactataagaaataatgatagtaataaattccaacccataaatacccatgagttcctactaatataaataaataattgaatacataaatatataaggatgaagaaacagctttttcttacagcagaattccaattaatgaatgtagaaggaatgatcaaatagaaaatcactatttggctaacagcacagtcaattgtttgtaggcaagaattatcaatggactttaaatatgaatgggtaaaagtatgatgatgctacaactagtgagtaccaagggggaaaaaaaagtacgttgagaagaaacaggctacttccatattcccaaagtatcacttcaggagctacttattgattataatgggacaaatagtaacttacagtagagaaacctggcaacagagtctctccgaggtacaaaggctctcttcaggaaggaggtaaggggaaggaagaagaaaacactgtcctgcctcaattatttgctttccccattctcaagtgtacttcatagacattcaaagatatgtgttgatagtgtccacgatccacatggctctattatagtcatttattcacacatacattcagtgaggctttgagtgcctaatgtgtgcctgatatttgctagatggtggatgctgagaagatcaggtgtgctgctgtctctagggtgactgaatccacctgccccactttacagatgtggaaattaaagtgaaaaggatttataggattagttcactgtcacaaggtcactagccttaaagttacaggagtaaagcaagtttcctgacttgctagattttctgctgcaggtgctgacaatggtgagctccaataggagagaggacactcagagtgaagtgggagccctgaacaccctggattagccaagaggacatgccgggtccagctgtgaccgcacaaaggaccattggggatatttgtattctctttttcacttagagcttgaaatgaggaaaactaagtgcagaaaaccaagagtggaagatttttcacaaagcactggtaacatgcatcagaaaaccctgtgctgatgtctgtcacggtgtttctcactgaacggtaatagtctggctttgagtgtgttccctctacagcctggagttctgcgaggcagggaccaggtgtgattcatctttgtctctccagtgacagtacacagcaggctctgataaatatttcttacaaaataaaatggaataaaaagtagacatctgcacaggtgtgggatgactgagcagcagcagaagcaggaaaagtcagcgtccccagatcagctgatgtggtgttcggattctagataggggtgaggtgccaggatggggatgggggtcctgtggctctgctgccctgggggacacccctaggtttcacagtgcctgctgtggttgctgcactttgcttccccatgggaaagtgatcagagggtgtggggcttcaggtgaccccatgtgggaaatggccaagggaaggtggggtgggcggcacatggttttttttaaccaatatttgaaggtaggttgtatgaaaaggtgttaggcttatttcagcttatggggagtaggacagggattggtgagtgtgtatcaggtatattttggctcaggatggaaaagaactgtcacagtaacataaggtcttttgggaaattacatgtttactggcagagttcaggccagggctgggtgtctgaaaatacctgtcagggtcacttttatggttacaagggcagagcttggcttggaaccaggtttcttactaataccacatattaagtattataaaaactgtcctttgcaataggacattgctctatgatgcaggttgaggtccctctgtttaagtaattgtgggtggctgtgattctctcatctagtctgcgacttggacttcacctccatctgcagtccctctcctttgctgttgacactggtcagagttaagcgcatttactgacgatggtcacagggtggcagcactgcctctctggtattttctaaaacctcttcctggaactgagccagtctaagaggatgtcatgactaagaaaagggcactaatgaggtgaacagataattttttttttcttgtttctcctgtgaagtaacagagtggaggtgagcatggaataattgccttttagaaatggaagacaatggagagaagtgtttcgcaaaccttaatgtgttcacagatcccacacagatctttttattcaatacagattctgatttttctggtgaggcctgagattgtgcatgtctaaggagcttttggatgatgccattgctgctggttggcggaccacactttgagtagcaaggctcgaagatcatttagaggttaattctcactgcatctaatttatggatgaaaacaaaccaaggtccagagagagcatatacagcttgcctaacaaagccattccctaagtgcctgacttcttgcatttaaacccagggcttcagcctttgtccagttctcactccacacatcacacggtttgttcactgttgtgaacgacagttgtggcagcatctctttagtttaggaatccagagccccaatttcactaccctctttggtcttggctcatgctgtgacttcgaatagttttgcccttacttaaaatcttcagtggctcttttgtaatcacaagatcaagttcgaatatctctgtctagtgttcatggctttataacatatggtatctctttagtaaccttacctaacttccctgttttaaaattgtctcttgctgccatagccctccttgctccttcctgctccctaacaaactgtgttcacttctctctcagtggtagtgatgatggcatggcctctgatgttagactcatgtaacttctaatcccagatccaccaccaacattggcaagttgattcatctttctgaggataagcatcctcctctgaaataaacttagatggcggttgagaggggtaaataaaataacacacaaacccactctcatccctgagaccctcttcaaaactagcatataaaaatagctatttgaagaggttcagtgaaattcaaggtaacacagagaaggaattcagaatcctatcagataaatttaatagactgaaataatttttaaaaatcaggcagaaattctgtagctgaaaaattcaattgacaaaccgaagaatgcactaaatctttcaacagcagaattgatcaagcagaagaaagaatttgtgagcttgaagagataatatatgaaaactcagagtcagagagacaaaagaaaaaagaattaaaagaataatgcatgcctacaaggtttgattattaagctactcaaagagatacaagagaagggtgaaaaccaacataaagaaatgtaaaaaacaatcagaatataaatgaaaaattttctaaaatgctagctagtttttttttgagacaggctcttactctcatcacccatgctggagtgaagtggcacagtcatggctcactgcaggctcaacttcctgggctcagatgattctcccacattagccttccaagtagctaggactaaaggcgtgtgccaccaggccaggctaattttttgtatttttagtagagatggggttttgccatcttacccagggctggtcttgaactcctgggctcaagtgatccaggagattcactgccaaaaaggatataaccaagtcatatagtcataggttatctaaagtcaatgtgaaggcaagaattctaagagcagtgagacaaaagcatcaattaacttataaaggaaaacctatcagtctaacaccagatttctcatcagaaaccttacaaaccagaaggtattggggtcctaatcttttggcttcttaaacagaatagctctcagccaagaatcttgtgtagagtgaaattatatttcaaaatgaaagagagaaatacagtctttttcaggcaagcaaatgcttcaggatttgtcacggctagaccatcctacatggaatgttaaagggacttctaaatcacaaaacaaaagatttaaatagaacagaatagaacctcttgaaaccaaaaaattcaaatggcctataaaacaataacacaataagaaaacaaagtagataacgatcaacatgatgactggaacaaatattaacattgaatgtaaatgacctaacactccacttaaaagacacagattggcaagataaataaaaaatcacaaaccaaatatcagctgtcttcaagagactcacttaacatgtaaggattcttatagactcaaggtaaagagatgataaaagatattccatgcaaatggaaaccataagtgagaaggaatagctatccttatatcatataaaacagactttaagcaacaacagtaagaaaaagacaaataaggcaactatataatgataaaaggatcaatcaaacaagaagatattacaatcctaaatatatatgcacctaactttggagctcccacattcataaaacggttatgatgagacctaagaaaaaagatcaacacaaaacagtgagggtgtcctgggttttctttttattggacagcagtgtactagcctatcactttcccagtcaggggatttttggtctccccattcccctaccatgggttcatgccaaagtccatattttttattagtgtttggaattggattttttttttttgaggtggagtctcgctctgttgcctaggctggagtgtagtggcacgatctcggctcactaacctctgcctcctgggttcaagcaattcttctgcctcagcctcctgagtacctgggactacaggtgcatgccaccacacccagctaatttttgtatttttagtagaaacgagatttcaccatattgtccaggcttgtatagaactcctgacctcatgtgacagggaaacaggcactcagtgaacttcatgcgattgaggagttaatgataatgagagaagggctgtgaggggacagcactggggacaccagagcctgtgacgggctgagttgctgtgccttgggagatgcccttttgactgagccctgggaaggagggggtgtgggggcaggagctgcctgcagagggagtggcctcaggtgggcggccacctggctgcagggaagaggtgacagagttcgtgtgcagagcttggagggtgaggaggaggtgggttgaggtgaccttggtgagggtgaaccatggggggctgtgggccctgctgagggaggccagccagccctggacctacagggtggtttggtcttttttgtcccattcccagcatccactgagtggtgaaactctgcaggccagggaccatcccactggccagaaggagcgcacagtaggtgcccactcagtgcatgttgggctggacagaacctcactctgccccctgcccccagctttgggagctgcagcaaggtccctccccctagggatctccatgcctctgtctctgaggggtgagatggggagacttcaaagggccatctcagagtgtgggggatagagacgcagaagtgtgggggatagagggaggcctgggctctagacccaaaggaccttacacacctcctgagtcttttcaaatggtttcttctgttactttaaaaatgatgtaagtcatcatatttattgtaaatcccaggaatctaatcatgcgtaaaataaggtgtcttatccttgaccccaccccttccccaattaaatttccaggatgttaccactgtttgcagttggtgtgaatctctctttaataatactctgtttatctcacttgtcgttttacgccaaaatacccattgaattatattattgctgaagaccattcttttttttttttttttttttgagatggattcttgctctgttgcccaggctggagtgcaatggtgtgatctcggctcactgcaacctctgcctcctgggttcaagtgattctcctgcctcagcctcctgagtttctgggattacaggtgcacaccaccacacctggctaatttttgtatttttagtaaagacagggtttcaccatgttggtcaggctggtctcgaactcctgacctcatgatccaccctccttggcctcccaaaatgctgggattacaggcatgagccaccacacctgcccagaccattctgttctactgaatcatgtgtggtgggcacctcttatatcaatacatatggattttatcttgtgtttgttattggctcccctttttctcattgcatggctacactcaatgctttgtccacacccctgttcctgggttggaatcttgtgacagaaaatgaagtaacaaaggctaaagctttctaaagtggagtcaggagattgcaagacaattgcactttcaccagcaagagctcaaaccacagaatgttccaatagatttggataaacagctgaagtcagtattcaccagccttcaacatctcaactaggagaaccctaaaattaactaagcacatagaatggaatggacttgtgatttaggattccttctcagccaatgagctgcttctgaaaacaactttttgtggaaattacctgtaaagaaaaccctctcctgtgcttgtcttacagaacactagtcagggctgccctgattcagtggacccgaattgctattatttgtttcctaaacatatggtattttctgtgaccttcatctcaatcttttttttaagttactgggctgtttcccagttttcataatgacgagacattctgcagtgtttcatacacatgtcttttccccatgtggagtattgatccaggagctcattcagtcaacgcatgtttatgaagcatcctgtgccaggctgtgggctggtcactgtcttcagcagagagaggacaggcacagtcttgccttcacagagctcacagctcagggaggctcttagaagtgggatactggtcggagcatgtgcacattaaacatgatgaggtcaaggttgctatagggactaaaccacagtcccaccaagatcgcattgagttcctgtggtagaccagaggtcagggcccctaagatgtcctgagcagctccctctgctcagaagttttggttccacaggtgacacacctgagcacaggtgacccctgcagaacctgtgattaccacccaaagccaagagtgagtggtgggtgttctaggaggaaccgtcacctccatgggcagggttggggaagactgaggggagcaggtggctgatgactttggccagaaggtagggggatgggcaggtgtgcgctcatagggaagggaagagaagggagggcattgcaggcaacaacacaaaggttggaacctgccttcatggactgagaaaagcagggagtccacccaggctgcagctggggagggaagacatggggagcagtgggtctaggggagaagcagactgcgattgaccttggggactgggcagtgagcagaggtgtgttatgtgtgtctgtccccatcatagatatgaggaggggtgaggccgcgggtggcacctgggtcggtgggatttcatagtgcctgctgttccctagagcctctctgtatagagggtcagaatagatctgaggctgtggtctgggggaaggggctggtggtgcttaccatctctaggggtgggaggagagggatgaggatgcccctgagcagtgaagcctcaaggtgtgtggagccacagttgtctctcattagacatgtgttttgcgtgaggatgccagggcctggtggttattactgttgtcaagtttgcatgacaaggacccaggtatccagggatccagagcacagggcccctggtgaggggatgaggctcagatggggctgaccaggttcatgtggtcagagtgggagggactgatggagagacagagcctcaacccctcctgtcaggagctgtggctatgtccaggagagatgacaaggatgacccaggacattgagtgagtcattgagacattgaaggtgaggacagggcagagaggaccctggtgactgctgaaatgtaggatgtgaggagggctctgacccatgcaagttacaggacctccccacccccgagcccacagatgacccttaaattgggcatcctgagtgctgtgtgtgcccagcagggacactggataggctggacctgagtctctgtaagggcagcgctggtctgtaggaccagagtcttctctgtgggtgtgacgtgggcaggaattagcaagatgggggtgacaaggcttggcttggaggatctggtacagaagcccatgggcttggtcagctcagcttctcaggggctcagctggggctggaggagcaggatgctgtgctcagggcatgctccaggcagcgtgatgtgtgtggttccagggtcaggcacgggggtcaaaaattaaccatgaaaagttcccaccttctgtaggcagagaaaatggcctgattgtcagggtcagggagacttaccatgtggccaaagcaggctctcagcctcccagagaccacaccctgggtgcagcactcagctctgcagggtatggcaatagatgtgccaagaaccccaacatccagatgcatgcaaaaattttgcgatatataaaatagagcagatcaagtttccctgcaataacgttgttcctggttgtgtctttttcttgtaaactagacatggacatctttccagcagtctgttctcatctgccaccttcctgctgcagcacctcagaatgaacattcctgagacactgtccgtggtgctgacgaccaagagctatggaacagagtgtgatgtagaatcttctagttacctctgctctcctttcacttttaacaacagagcatcattaacaatgagaaggtggagaggtgttcaggatcttgaagtgacttctgtcttgctctcccataaccctgaagctgctgtagacattattgcagaaactgacaccacagtcaggatggccttgtccaggagcccatgtgcagtttgtagtgagcaaggatgagaaaatggtcttgaaaggggtgatggacagaacaggggcttttcaaaaatgtcacatcatcacccccagcatccgtgaatctgtcacatggtaagagaccttacagattaaatgaaggattatgagtttggaagattattgtagtttatccagatgggtccaacataatcacagaatcccttccttacaaatgagagagggaggtgggagagtcagagaaggaggaggagatgtggggatagatgcagaagacagagcggtgtcaagatgctgcactgctggctttgaagatggagaaagaggacacagccaaggatgcaggaggcctctaggaggtggaaaaggagaggaaacgcactctgccctggagcctccagaaagaacgcagccatgtgggcaccttggttcaagtttctgtgtcacttagcttgtgggaatttgtcacagcctcaacaggaacctacagaggagtcaccttgtgtgcaggtgggatccagggtcatttacagctaaatcctgatgtaaatattgcaggttgcttttcctacttcctatctcatggccaacaaccctggacaatggcagaacacccttggaaaccacggctctgtgctttagtggagggaccagcttgtttgtgggaaggtagcacctggtccaagtgaacctacatgagatcgttactctccccagggccctcagggaagggctgagaacagctggcccaggtgtgtggaggagctgcaggtgaggcagggctggaggggcctgtgggtccaggtagaggggcagacaggttgtcccatcgccatgggagcctgcacgagctttaggttggggaaccctgctcctctgacctggacgctcctgtgtggagaggaggcttgctcagtgagatccacgccagggggtaaattgggaactgatgggaaatgaggggctagagtcctgggtagtgcctgggaggaccttgctcaaggactgaattcttggtctgttcccaccttggttactctgacaacccctctctgtgtcccacggggataaagatctcctgagcagtggccattgggacagaggagaacctggtggccagagctaagcatccaggatcctggatttggggacaggcaagctcattgctgggggacagtgatagatacggcctccagggcctgggtgaagagagcaggagggctcaggacactggaggctgtgtggaggtcacacccacgatctgtaccacccatggatgctcctgcattgctcacctttgtgtggacatcagatggccccaacttttgcactcctgagacatctcatgcattcacagagggacccaggctggggctgtgcatggccttggtctctagggtagtgtgaggacagctgagcactcagctggctgggcaggactcctgcgaatcctgccctttcctgtgtagggtccaccccagcctgactcctaaccccctactcctgtctttccagggaagagagactggggttgagataaggtggagatatttttcctgtgtgacccaggagagaatggacatggagtttcaggtgagtttctgctaagttcccatgagcagaaaaagagccaatgagaggaagtttcccctttattcagatcctttccaggtgaccccgggtgggccataggcccattcactttccctgcaagcccccgcttcctgtggtgatgggaagccttcgccttggcccacccagagcccggggcagtctgttgaggtctctatatattcagcagggacccccatcccttcctgtccccaggcctgtgtctcctcaggactcagagctggttctctggctcaggctccatgtccttccccatccccagggctgggggcttcagggacgctccatcaacccacaggagcagctcccagaggaacctaagaagccacatctgctttgtggtcgatccagcagtaaatgtttgtgtcagagtgtagcaattccagtaaaaacagagaagaggtcttgacccctgaggccttctcagaacagggtctggcatctctctctgggcccacccagggctactctgggactgaacctggctgtgctcagggggttcctgctcccaggcccctccctcctctgctcaccacctcctgttattttcactgcagtttcctgaacttcagctcagccagatgccagtggggacagatcctgggtctccctggggcccaagggaccagaatatctgtggcccccactcacctcatagatgagagcagctgccctggtgctgggtaggggaatctgggcaggggagagaggggtgtcaggggacagggaaggattcctgctgtgtaggaattccagggctctcctcaggtgatggagggtcccagggtggggttagcacagggagtggatgatcctggccctgaacagaggcccagctcatggccagggcaggtctaaccttatccaagtcattctgggtagggtgggtttgtgctggggattgacagtccccctgccctgagcctgcacagctggggccccagtggaaatgggattgggaacggacagtcttacctaggagatggagctgtcagagggtccatggcctggggacagagacaaaagtgagcacgagagtgttaggatagctgggcccctcctgcaagagtgtgtgggggtcctcagttcttagagaattggggagagggagcctttctcaggttattttaggggtcaagtaagcaagtgaggttgaggaagtgacccatgacccagagcccggaggttagggctgacccggccagttggggtttcctgtgtgatgttttatgggatcctctttgcagccccagggatagggtcagaggcccctgggtgtaactggcaggagtggacaacttggggctggcttagtagttcccagccacacccagactgaagggacactcaccgggggtggaggctgggggctgctgctccctgaagtcactctgatcgctggccctaggaaaggtcagggttatttgtgaaggtgcaaggttaaaagtcacaaattggagttaaaataggggaccaggaaaggagcctatttccaagaggggtatggagacctcctttctttatggagttctgtggtaggaggggcccaggtgaggggagttgaggaaaggccttacaaagccacatctgtcctggccagaggggaaggactctcaggcagatgctgggccaggagaacattgatccagtgacacaggaaagggactgaggacccagggaaggaatcagaccaccaggggttgcctgagaggaagggtcaaggcaccagggggaaagcagggccaggcacatgtgcaggacactgaggggactgcatgcatcttggattctcctggaactcagtgtccctgctgtgaccagacactccactcagggctggagatgctgaaatgggacaatgatcttgtcttctgtctctgccctttggcaagagacataaacgacattccaggatatgccatattggggccccggttctcccttctcacagctcagtgtctgcagttaccatgtcagtcaaaggggtgctgaccccacccagcccgtccaggctgttccagtctccactatgtgataatgcccaggatcccccctcagatgccctctcactgggtggatggattcagtgaacagggggaggtaccaggtattgagcaccgctcccccctgctccaggcagctgtggctttgctgtgctaggaaactaggaccatgctcaggggcatggccttaattggactgaattcactgaggacaaagctgttgaggaagcagcccagggtcagcagctggtgaggaaggtgccatggaatgagagggaaggatccctggggagtcgggaggctggggagagcctggcactgaatacaagacagggtctccttccttctcgcctggggtcagcgtgaaggatgggagcagaatggggaaaagctgtggtacctgccagtttttcggaggagcaggaaacacacaagtgcagccaccagaagactcccaaccaggaccccgatcaggatgcctagagtgttgtcatctgctgaaagaagaaggcaaaggggatgaggtccaaatctgttccagggggaaccatgaggggccttgcagggcaggggcatggtcagggaggaaggaaatgccatggagcctgagtgtggtctgttgtgctgtcctcatagctggctcccttgctctccgtggttgcaccattttctgtgtcttaggcttgaattactgggatgcatcaactcctacattctcccacaggaagcctgcacctcatcctgctcctgtgttttttagtccctccttcctctcacatcactcctcttccccctgtttctttttttccatcccatggcagtcgtaaagggcaggcccttgctgccaactcaatgctgatgagcagggatgatgttcattgactgttttcaggggccttccacatggaaggcacagtgggaatcaatctacctgcagcttttctcaccctcccattgccttgagggagaagggtatgtgatattgtgaaatacgtatttggtgttcatcaccattgatatggttaggctctgtatccccacccaaatctcaccttgaattgtaataatccccatgtgttatgggagggaccttgtgggaggtaattgaatcatgagggtgggttttttccatcctgttcttgtgatagtgaataagtctcaggagatcagatggtttcataaagggaagcttccctacacatgtcctcttgcctgctgccatgtaagacatgcctttcaccttccatcatgattgtgagacctctccagccatgtggaattgtgaatcaattaaacctctttcttcatacattaccaagtctcaggtatgtcttcattagcagtgtgagaatggactaatacagtaaattggtaccagctagtggagtgctgctataaagatacctgaaaatgtggaagtgactttggaactgggtaacaggcagaggttggaacagtttggagggctcagaagaagacacaggaaaaaagtttgaaacttcctagagacttgttgaatggttttgattaaaacgctgatagtgatatggacaataaagtccaagctgaggtggtctcagacagagatgaggaacttcttgggaactggaacaaaggtgactcttgttatactctagaaaagagattggtggtattttgcccctgccctagagatctgcagaactttgaacttgagggaaatgatttagggcaactggtggaaaaaaaattctaagcagcaaagtgttcaagatgtgacttgggtactgttaaaaacactcagttttatgtatttacaaaggtatggtttggaattggaacttatgtttaaaagggaagcagagcataaaagtttggaaaatttgcagcctgatgatgcaatagaaaagaaaaatccattttctgaggagaaattcaagccagctgcagaaatgtgcataaacaatgaagagcaaaatgttaatccccaagacaatggcaaaaatgtctccagggcatgtcagagaccttcctggaagccccttccatcacaggactggaggcctaggaggaaaaaatgtttcctgggccaggcccagggctcccctgctgtgtgcggcctagagacttggtgccctgcatcccagccactccagccatggctaaagagggccaaggtacagctggggccatggcttcagagggtgcaagccccaaaccttggcagcttccatgtggtgttgagcctgcaggtgcacagaagtcaaggattgaggtttgggaaccttcgcctagatttcagaggatgtatgaaaatgcttggatgtccaggtgaaagtttgctgcagaagcagagccctcatggagaacctctgctagggaagtgttgaagggaaatgtggggttggaaccccgacacagagtccctactggggcactgcctaatggagctgtgagaagaagaccacaatcctccagaccccagaatggtagatccactaacagcttgcaccatgcacctagaaaagctgcagacactcaacgccagcctatgaaagcagccaggagtggggctgtaccctgcaaagccacaggggtggagcccaaggctatgggagttcagctcttgcatcagtgtgacctggatgtgagacatggatacaaaggagatcatttcagagcattaagatttggctgccctgctggattttgggcttgcatggggcctgtagcccctttgttttggccagtttctcccatttggaatgggtgtatttacccagtgcctgtacacccattatatctaggaagtaactaagcttgcttttgattttacaggcttataggtggaagggacttgccttgtctcagatgaaactttggacttggacttttgggttaatgctggaatgagttaagactttggggaactgttggaaggcatgattagttttgaaatgtgaggacatgagatttgggaggggtcgggtggaatgacatggtttggctcttcttcacccaaatatcaccttgaattttaataatccccacgtgttgggggaaggacccagtgggaggtaactgaatcatgggggtggattcttcccatgctgttctcatgatagtgaataagtctcacaagatctgatggttttagaaaggggagttcctctacacatgccctcttgcctgccgccatgtaagacatgccttttgccttctgccatgatttcaaggcctccccagctatgtggaactgtaagtcaattaaacctcatttttaaaaaaattacccagtctcaggtatgtctttatcagcagccaagaccagctcggtcgcggagatcctaacccagcagtgctagaggaattaaagacacacatagaaatatagaggtgtgaagtgggaaatcagggttctcacaggcttcagagctgagagccccaaacagagatttacccacatatttaataacagcaaaccagtcattagcattgtttctatagatattaaattaactaaaagtatcccttatgggaaaccaagggatgggccgaattaaaggaataggttgggctagttaactgcaacaggaacacgcccttaagatgcagattgctcatgctattgtttgtggcttaagaacgcctttaagcggttttccaccctgggtgggacaggtattccttgccctcattcctgtaaacccataaccttccagcttgggcattagggccattatgaacatgttacagtgctgcagagattttgtttatgaccagttttggggccagtttatggccagattttggggggcttgctcccaacagactaatacacccattttctggtatgtgactctaaagtccttagaatcttcaaagtgatgtctttttcaagctaataattgactgatgactggcagcccctaggcaacttcagaatgaggctggtcactgacccaggtaggattagagggttgggactttcagcctcacccctaatccctggggagggacctggagtttgaattaatcaccaatgaccaatgaatcaattaatggccaatgattgaatcaattaatggccaatgattaaatcaatcatatctatgtcatgaaccccaaaaggactgggtttgaagagctgaacccatggaagtttctggagtgtggtgcatctggggagggcatggaagctccacaccccttcccacatgccatgctctgtgcatctcttcatctgcatcctttgtaaagtcctttattacaaaccggtaagcctaagtatgtgtttccctgagtcctgagagctgtttgagcaaactaatccaacccaaacagggagtcatggaaacctcaatgtgaagccagtcataagaagctctggaggcccagacttgtgactggtgggaaggtggtggcaattttgtgggactgagccctctgctgatatgtccaggtagatagtgtcaggatggaattggaggacacctagctgatgtacggtgcagaactgattggctgctgggtgtgtgggagaaacccccccgcatcacatttggtcacagaagtgtgtctgtgttgatgattgttattgtggagtgagagcagaggaaaaacacagtttgagtttttccaaacagggtggaatcccatctgccaatttagaatctgaaacttatagtttcagtacttcaattaagattgaagtacttcaattcagtacttcaattaagattcagtacttcaattaagattcagtacttcaattaagattacagaactggtaagtgaaagtgatacaacaaaaatgtaaccaaagtctgctcaacttaacagctaataacaacaaagttcataaaaataataccagtcgatattgatagcactgattgagccctggctctgtgcatgaccttgttaagggctttaatcgcattaatctctgaataaatatcctcacaaccaccctgagatccaggtgtttgtaacaattctacagatgaggaaactgaggcccaggaggttgagtgtcttgcccaaggtcaaatacctggtacctattgtaaccaggatgataactggatgagtctaatccctgagttcttacccacattgctccccaggctctgaaggaatctcatccttctcattccgtgtatcattttacaccccccctccctcctaggaaaatatacaaggaaaggagtgagaggggccgagggtcactcacattttacagtcagcttgagggggtcgctcctgttggagctgactgggttggagacctcacactgatactccccagcgtcctcctgcctgatggggtctatggtgagcatatggttaaaccaggacagcttcatcctcttcgtgacctgcagacgctggttgttgaaaatccactggaaagaggttccagtgttatttgtgtggcaggtcaggaccacggagcccttctctgtgactgtggtgctgctggcttggatggagggctgagccactgactctgtggatagagtgaccaacagaaagtgtcttggggccatgctgcatcctcagagatctcagagtcaaatttagaacattctcctgtgaataaaggagaaagatgaaggacagggaggagcagagagaaccagagacacccatagcagcgagcagtagggactacagtgacctcagagaccccagggaccaggaggacccagctgcctcagaccaggaccagggagccctgaaaaccctcccacagatgagcggccccagagtcacatgagatgcaatacctggggtggctttaggagcaggcagtcagagaaatggaacatgggtctcagcccctaagggacaaggaagaggtgtggccagctcctcctaggatcctacatccaggacccagtctgtaaagaggttatgattattcctttcttttttcattaattccctccctccttcatcagagaactactgagtgtgtgtctcagttgggccttgtgcaggtacagggtgtagtgggaagagaaagctgagtcctttccttcatcctcccatgggagtgacatcaacaaatcaagaaattcatgatttcacgtccagtgagggaagaaatgtggatctgatgggagaggcttggacaatcctggcattgagtctgatagttgagacaggtgatttcgttctaagtaaaaactgactaattctccatttgcccgtcattcctcagaccagaatctccctctctgagctgaggatgcccaagaagaaaggagctgaaccaacatctggtcctggggtccacagatgccccacggtggtggccacgaccagattctgggctgcagacacacggtggtgtgacgttgagcactgacagcctgtgtgatgctgatgcaatttctctttaataaaatggggtaaatgtcaatggtccctggcttgccatcctctctgtaaattaacattaaaatatttacaattacctgacctaaagcttggcacagaatagctccaaataaacatcatctattattattttactccaaaaaaaaaaaaaaaagagttctctgggcctgattcctggtggagaaggagcggtccagagtgtcttttctctgctttccctcctcctgaggacagtgcacttcccgggacatcttttaagtttcccatccagtttaatggcctgggaagtttgtttgtctgtcctctccactctgactctcaggtgaaagatgaggctctgcccttgcccagatggggctctgggggctgagccctgcctggtgaccagctctaggaaccacggccctgggacagctggtaaatcgttgctcacaatcagccctgcccaggaagccacaacccagccctggcacaggctccccagggtcatctggagtcaggatcttgggacaggggcctggggcaggggcttgaagggctgagcttctctcagaggatcctcaggccaggccctgactgagtcctataagatctttctcaggtcatgtctatgaggaggaggccaagcggggttggactgagactgattttcccccgctgcatctcccgcatcagactatccttcttgctgtagggaatttccacggagtccggataagggaaaggaattctgatctgttatagtttgtctcccctgggtgtgtcctgcactaaatgcccaaaccccaacatgggacgtaatgcagagggggatgcaggcacagcccaggcctgacaatcctgcgtatgtgaagcagaactgacccccaacacccagaggcacggaggaatcactcaccgtatacacggagatggtgagatgcctgttcaatctgagaatttctgtatgtgacttgtagggtgtagtatcccgtgtcctctagggtgacgttctggaaatgcagatctccactgggtgatattgtctctcgaccgctgtatgcaggccctggagtcctaacgtgagtgtctattacatatgctgcgattagctggttgggctccaccgttttccctttgtaccagccatagctgtaaagattctcgggcagataaaccacagagagatgaacattctccccttcagcaacttcaaagggcgctgatgcaataaagagccaggcagtggtgggtgcgttccagaaagttaaaagtgaggctaggaaagggagagaatatcagtcaatatttgacctatgcattggcatggaaagacggggtcctgggtgcaggtctcttcacccctcagccttagagggtgtgtgtgtgtgtgtgtgtcctactgggtcaaagtcagcagcatgaccctcattccttcagtacctctgaccttggcatttccttgtgtgaaccctctttcccaggggtctgcatggttccctccccactgccttcagttcctactcacacaagggaatccctgggagacttctttcgtgaagcctcctctagagaccctgggtcttccctttctgacctttcccagctctgttccctccagggctcttgtcagcacctgacctcacattctagatctctttgggtgtctgtcttcccccccatgagattgtgagctctgtgagggcatggacttgagtgatgttagttgcaccccagtgcctgggacaggctgcagactcctgtggatgagttcatgagcgttcccagggccttccatatcctggggtttatttgctaatgtctgaggttggcagatgaagacagagtttcatgccctggtggtgtttttatttaaattgtcactgtgatatagttttactatcattttcaaaatgtagtggccactgacaatgaacttgaaaacatggaccaactgagattgttttgccccttggcaattccagttcacttagattttttggttctccttagacgctctctcccctgagtctctaacaaaagccctctgtctcctctcagagccccatcctccccaggagaccccagccagtctctgtgctccctcctcccacccactcccagggagtcctcccctcacctgtgagcaagagcccctgccaggggatgcattctctgtggggacaagctgaggggggccccatggtctctgctgcctgctctgtcctcctctgtggagaggagcttgggctccaggaacgctctagacagggttactgtgactgttgtctctgctgtccttccttcctctatgctgagcttcctctcaggcaggagcacttcccgtttatgggcaagggcggggctctgcctacaatgtctctctgtcccctcccctctcagtcctgcctcccttgtccctcctttctccttcctttttgcctatatttggttccctaggcaaaactttgagaagcaacgctgatggggtcctcataacaggacgacccactctccccagtactgacctctgctgtgttctggccttggttctgtcacagccggtagattatttccctttgtgacacacaaaaccagctgggccctgggtctcctcatgctctccagtgctccaggaaggcagaatgatgcccagcaggaaagtgacagaggtggctctgggggctagaaaggggctcactgggtgatggctgggaaggacccacccgctatcttcagtgtcaccagcctggcctctgacccagggacagagacccaggcctggaggtctcgggaggatccccagctcctaggtgtggagggaggtgtcctgtgtgtcctgggaagagaggactttgatggaaggaggtgggaggctctgggttctgctgtccttggtgaaggtttcagggggaccctctccatgtctggggtctgtgcccccagcttaactctcattctctttgcaaatacatatattttgtggatctgcagttgcctgaactgtctcatgtccctaaatctttgtatccctttttacagaaggtcaggaagggtgtgtacatgagtatgaggactatctgatcagggcgagtgtttgtttcccaaagatctctttagatatggtataatacataagataaatgtactgaattagcaattttaagtgtagaattaaatgatactaattctattcacaatgttgtacaaccatcaccataattttttaccagaaaatcttcattataccaaatggaaacttcatacttttaatcaataactccccacttccccctgccccacccactggtagcctctgatactatcaatctctgtgaatttgcctagtttacatgtctcatataataaggaattatatacgtgtattatttttttctggattatttctcttagggtaacacttttaagattcatccacgtcgtagcatatattacagcttctttcctatttatggctgagtaatatcccaatatatgtttatacctcaattttaattcattcatctcttaatggacatgtgggtggtttccacatttttgctattgtgaaaaccgctgcaatgaacttacacttggaagtatctgtttgggtttctgtgttcatttctttgggggtacatataggagtataaatatggggtcatgtggtagttctatgtttaagtttttgagaaacagccaaactgttttccagtttgctgtgctattttatattcccatcagcaatatacgagggttccattttctctacattcttgtaaacacttactatttaatattttttaaaacttatagccattctagtaggtgtgaagtgatagctcattgcagttttgattttcatttccctggtggctgatgaagttgagcattttttcatgtatttactgacaattttaatattttttagagaactatttattcaaatcatttgctgtttaaaaaaaatgggttatctttttattattcagttgtaatagttctttatatattttagatacaagtcccttatggggtacatgatttgcaaaatttttctcatattctgtgtcttctcactttcttcatggtgttctttgaagcacaaacatttttaactttgatgaagttcacttatctatttttaattttgttacttatgctcttgatgtcatattgaagaaaccattgcccaatccaagatcattaagttttactcctatatgttcttctaatggtttgataagttttgctattccatttaggtttttgaaacattttgagttaacttttgtatgggctgtgaggtaggggtctaactacactatctcgcatgtggttatccagttgttccagcacaatatgaagaggctaccattctttccccattgaggaatcttggcacccatgtcaaaaaccaatgggctgtaatggtgagggtttatttctggactcttgattctattccattgatctctatgtgcattcttgtgccagaagcacactgttttaatgattgtagtgttttagtaagttttcaaattaggaagtgagtcctccaatttttttttccagattgttttggccattctggggtgacttttaaaaaagatgtagttcaatggttctcaaagcaggagtggttcagctctccttttttggcagtctggagacctttttaggaccttaatctaagtagataaattattcccactttcttttctgagttgctatgttacagtgtatattgacacccatgaaataattgagagaccctggaagtgcttgcctacatagtgagggacaattagttccatgatcatgggcacagaagattttgttttgggaaacaattttgttggtggagttatattcatgcttactcttttatttgtcttcatagcctgcatctccttcagacttcatatctgtttattttcttgtttgtcctctggggtttgggtgttgggtgaccagtcagctggagctggaggaggtgcttagcaaggcagtgaccctggttgggaggagcagggctcagcagggtgaaagtagctgggccttgagtcaggagtggcatctggaaggcctgactgtaagggtcagaagggccagcaggtgggtgtcctaggcacaaacggtggctgctgctgtggactggaggaaggtaagaggccccgagtattccatgttcttactggctccccaactgaggattcctctcctgggctggtgctgtcctgcagcagggaggggttagacagggacggctgcacatcaggccggagtccatgtcatcctcttaggcactgtcactacagattgaggattctgttcataagccaagcctttgcacaaggaagggacccgggctctcaaggaagagcagctcctggtcagacctccatctccttctctctcattgcctgaggcctcaagcttggtctacctggcacaggggtctggatcctcctcccagggttggggtcttactgagctgggcacctgcaggtgggagaagatctggaggggccccatctgccttcaccagattgatgttgagggtccctgagtcctgcaccactatcaggtgctgagcaacttccagtgtcagtgacaaccaccccatggtggaagcagaaccacctcgtgagaaagcacctccaagcctcagtgcttgccatgtgtgggaatttgctggtttcagttgggggcatgttggtgggtggtcatgaattcagggccggattctatgctcacagtgcacatgctggatgtggtacagaccccaggcagggctcagtggggtggttttgggtgtgcacaggtatcttttctggaggagctggtggtgatttggctcccagaagttcctgagctctgcagactcaccaagcactcaatatttgagtgaacattgggcgagagagcagaaggtaagtgtcagggcatcggggttggtgcctctgggaagaggaggaacattctgggaacaaagctctcccccggcttacagggagcttcccatcgctcctgccttgaggatcagggaaactagggcctctgctcttccaggggctgcttgcaggcagtttgctctgggagggggtgacccaggagttgcctctcattttgcatttgagatttaaaaggagaagggacagtatatcttgccaggtcacaaaaattacaggcatcatattgactgaagggcactcctgtcatcactgcaatataccagaatggtcttttaaaaaaataagtgatttaggtttaccagcaactgtaatgcttgttttattcttctagttcaccgttaatgtcacttttgtagttttagcactggcaatgttgattttatgttgactctgatgattttaagctttcatttgttcacatagagatcatcttctttctgaatattaatgcattttttctctatttctactggttattcctgtacatagagtagagaatcacttttcccaaggaggtggaaagcttctgactaccaaaaaaaaaaaaaagtgtcaaaatgctttaaagtcagtaacttaaagatcaaatccaagagtgggcaacagattctgcccagggtctgaaaggtggagaggtgactggtgaggatgtttaaaagacctctcctctctactccctaaatgggggccatccagtgttcttgaggttcagagaaggcccagggctggggcagcagggcactgtcagctcccagctcccaggggccaggagtaagaccccaacactgtccagacactgattgcattcattttgggggagagtagattcttatttaaagaataatacaaaagtctacaaatatgaacataaacagaaattcctttgctacaattttccccttaataagacattccttcctaatgacatatgtgactgcattcatggctgagatgttttctaggatggtgagagcatcagagtggactatctggtgccttggggtcatgcattttcttcttccaatgtctacaggatcccccatgtcccactttgtagtgtaactcagtgtgtgtcattctggtttttgttgtatagatccttggaaagcccatgtcattcctgctgtgaggtacaggcagccaaatggcatcatctctaaacatgccttctcctggtacatcaaattatggaataaatgaaagccattttgacagatattgaagatataagtttctactcttcccacacatgcttctcccaagtgaaggattttactggtgaattgttattagagattagtgtggatcagtgactctgccaggggaaattttgccctctaggggacatttggcaaagtctggaaacattgttggttgtcagagctgggggagggagtcctgctggcattgagtgggtggatggtgctgaacaccctgcagttcacagagccccaccagtttgaccacccaaatgtcaatgctgaggagtggagagccctgctgtgccctcccgcagcttccctgaagcttcccctcacctgctcctcccatgtctccccaccacttccccacttcacccgcctccttacacctcagtcccctccacctgaactcaccccttagtccaaggccagccctgatctccgctctcctggtctccttgctccttagcaggaggcgcccactagatggcgcccttgcccttactggagctcaccgtctccctttccaccctgagacaaatgtggctgcttttactgccacaaccccagccctccacactctagatttgctcagggagcagctcctggacagacctcagggaccccagggaggagcctcactctggagattttgatggcatggtctttgaacttcactgttacccccagtcaggatccaggatgttgggagtgcatgattctgcccggtcccacttcagcaggaccccactgctgagttgtctgtggggacccgggcctctcatctccttcttgcattgcaggagagggatcttagcactgctttcacataaagtcagataatggaggagtgcaggtgagtttgggaaggtggacatgaagagaggttgtgtccctagaggtggcagcagtgagaggatgggcaggtgggaggaacacagcccatccagggttgccagccatattaggagcgacagcctttcctctaagcctccagcctttttcctgaaacattccagaactttccacttcagcacttcccactgaggctcctcaggtctgtccctgagctcccagctgagcctacctacccatctgaaatcctgagtcctgtgtcaccctcgttccccattattctgtgcagttctgtgggacgcccagctctcctgacacccccagtcttcagaatggccatcagcgctgtcgctgtggcaccagggtgactgccgcctggaggctgagtcctggcttcctgacagctgtggggcccgctctaggctcccttgtcctgatcattcatcacctccaggatgcacagcagctgggccagggggaggagcagggacaggtgtcagccaccctgtgtgtctgcaagtcaggctgggggtgtgggaggacgccaggaatgactgaactttctgatttagagggtgagagcttgcactgatggaatttgggatttaataggaaaagcatagcgttttcctattttgtaggcagggtggctggagtttggaatcatagattcccctgggatgtcactgtggacctcagtcccacccgttaggggcacagatttcagaatccacaccctggggcaaagcaggcatgggaggctccatcagcctggccagggctctctatttgtgcagctgctgcaaggagatgtgcactctgatgggaacagtgctccctcctccttggggggcagtatctagctccctgcagcccctctccctgcaggccctgccctctctgaacctcaccttccccaacccgccccccgcaatcccatctcagctgtaatcccaacactttctcatccattatgggtggactgcttgagcccaggggttcaagactatgctggctggacaatatagcgagttgttgtctctacaaaaagacaaaaattagctgtgcatggtggcatacacctgtagtcccagtcactcaggaggctgaggtgggaggattgcttgagctggggaggctgagttggcagtgagttgagattgtgccactgtatacttcagtgtaggtaacagagcgagaccctgtctcaaaaaataaaagtaaaaaaaaaaaaagaaatatggaatacattattgttaactctaatcaaccatgctatgcaatagtccaccagtaataccagtaatagccaataatgaattatctgaaaaagaatacaatttattcttagctatctactgctaaaatttttaagctatcttttatgatagctgaaacaaaagaagtaaatttaaccaaggaagtaaaagacctttataatgaaaactgtaaaacattgatgaaataaattgaaaaagacacacgcacaaatagaagatattccatgttcatgaattggaagaactgatattgctaaaatgtccttaccacccaaagtggtctacagattcaatgcaatttctgtcaaaacaccaatgatattcttcgaagaagtagaagatcctaaaattagaaaccacaaaaattcctaaaacctgcacaaaacaccctgagttgccaaagcaatcttaaacaaatagaacaaagctagtggcattacacttcctgacaatcaaagcatactgcaaagctatagtaaccaaatcagcatggtcctggcataaaaacaagcacatagatcaatgaaacagaataaaaatcccagaaataaacccatgcatctctagctaactgattttcagccaaggagccacatgcacacaatggggaaaggacagcctcttcaataagtggtgctggggaattggatattcatatgcagaagaatgaacctagaccctatccctcaccatgcacaaaaaattaactcaaaatgtattaaataaagacttaaatgtaagaactgaaactatgaaactactagaagaaaatatagggggaaaatccatgacattggtctaggcaaagagtttttggataaaatctcaacagcataagcaacaaaaccaaatataaacaaacgggatttcatcaaactaaaaagcttttatacagcaaagaaaaaaaaggccagcagagcaaagagacaacctacaaatgggaggagaatatatttgtaaatatatacatatatatttgtaaatatatacatctgataagaagataatatccaaaatatataagaaaattatgtttctgtatagttttatctgactgggatacagaggccacatccacagtcccatcctcaaaggccacttgttcccaaaatgtcaagcacatccctcaatgatccatcatcaacacctatgtctgtaggatgaagggtgaatcatgaagcactaaaaaggaagaaggaagccaatcccaaaacaaaatgatgcagggtctggaaagtccaaagcattttttttttttttttactgcatcttcctcctttcttctccacattcccaatcctcactattgattaacaaaacaaaaaaaactgggacccaccatcttccctactgtcaggagatctagcgagattgtttgagtcttagaccaaactttgccataagccaaatttctggctgactttacaatgatatgagctagcacagtctctttttctgccagtcaacttgtgctcggttttatttgcaaccaaatagaggtggtaaccaaatataggtgaccctaaaattagtcatcaggatgaaatcctaaaatgtgcaacaaactgggttgaattcaggattagtagcaacatctctgttgtgggcttgaaaagggggcacccttttatgcagtagcaaaattgctaaattgttgtttgctgagtctttggactctcatcccggattttctatgaccattcaaacagggctgcaatgaacatctatggttgtttagcttggcacacttctacatttctatatagtaatatctagaagtgcatttgctcaatcacaagatatgcacattttataattgactgctatcgaactaccttaaatagccttaatttgttctcaacattgtttaacagggtctgtttaatgtcctacgtccagcaaggacagtatcacttttcttaatatttttcaaattattggaccttaacaaatacttaatgtgcaattaattgattcctttgtattcccatgccttcttttatatgtttccttatagtacacaaaaccacattattgtttctttacttgtgtcattccaccctggaccattcctatctaaactataacattatgagagagagagagagagaaaacaatatgaaaatataaattgattaatcaaaaaaatttaaataggacaaatcaggaagacacaagagagattttaaaattattcagagaataccacaatagctgtaccaatatattttaaaacttagatgaaacggacaactatctcgataaatgtaaattaccaaaactgactcatgaaaaaatggatattatgaatagagcaataatcagtaaagcaattaaaaagacagttgataatttttatttactgacaacaataacaaaatttcaggtcctgatatttttatggtgaattttaacaaattttcaagctcctcctcaaccaattctcagaaggtttaaaactttaacaagaaaacactttctaacacattttcagaagctgttatagcatgataccaaaaccacacaagaaaattatagaccaatctcacttacaaatatacatgcaaaatcaaacaaaatcttagtgaaccaaattcagaattaataatagcaaacaagcaaaatatgttatcatacgtatggcttatatcaggaatgcaagtatgtttcaacatcagaaaatacttctccacattaacagactaaaggagaaaaacgcttgtttaattatctcaataggtttttagagaattttgaaaattttataaagttatgcgtattctgtaaaattgatgaaatccaaccttgatttatttttaaaaattgcctttcctatagaattataggtaaaggaaacacatgcatcctcacagagctacttcaaggctaagttacttcccataagtaacgtatcctgtaatgtgtgcttggcacatattcaatactaaacaaatatttgcaaatcctcaaaccacttctcgctcaaataacccacctttgtcttttgcctttatgttagggttgattttctcaattgtatcttggagatcctttggtgggtctttcagcaattaccctgaatttgcttttctgtttacaattttaattcctgggaactctttcttgttctctgactgcacccttttcatgagagttcagccatcaatcctccagaaccccaccccccccgcccccccaaaaagcaataaagatgtctaaaagcttccttctgggctttcgaatgatgtttaccccaggcatttgttctattcgttcatcacccattttccctacaacttgcctacacttgatatcagatttttatttattagtcacctatcttcttcattggcccattttcctattttgccactggttgttctcaaatgtgttatgattcctggttgtacagtcaagtggttgataatcttggatatacgataaagatttgctctgtagctgtgtgtaagcctatataaaagcttttgtatttttcttcttaaaaaagacaaaagatggttgggaagatccctccagttcaccagttcgaggctgcagtgagctatgatagcgccgctgctctagcctgtctgtctgtgaaaaacaaggggggcggggggcgggggggaagactggagatgtaaatctcccgcagggccctacccgtatccgcaacaggtctctaacaggaacagcctcaggcctgtgttggaacaaggtaggttacagaaatctggaagccagatctgtaacttcagggtaaggactggctctcagggctgatcccccgggctgggtgtcccagaggcacccgcccccgccccttccccaaggcaggccaggacaccttcactcctctccttaggctccccacccccttctcctccccactgtgcctcctggagtagcggtggcggtgccacaggggagcggggcggggcgggctctgagggcaagggggatgggccccgccggggtcactggcggccaccctggaaactcgacgcaggccggcccttctagtgaatcgtcccagccacagctggcctcccagccgcgcttggggcgcctcggggcgcgaatggtgcaggttggggagactcaccacgcaccgtcgggggtcggtccggttattcctcaccgctcggctccagtgggcgcgcgggcctctcctcctcagttcctgcgctgcagtccctccctcacccttcgcagcttgggaatccaactgtgtcattccgacggagcgccgtgaggacctccgagggtgttagcgccaagtgatctctgtccagcgctctgaatatccaagtaaaggagttcaatgaagggcgggtcaacggaggagaaaccgtgactctctcaagggagcccaaggcctccttgtctaattagtgacgcgccaatggatggaggctcttcccaccatctcttcccagcatccagtgacaccaccgccaagggacgggctcggcggaacctgcaggaaagaagcatcggctgagcctgactgcagcgctgtgaagagacaggggaggggatcagtagttggtcccgcgcccaccccctgtttccgcgaggggcggagttgactggccatgcaggcagagggcgaaatgtgaaattccactactcctaccgtttttccctgacccgatggggcggagtgtcgtcaggctaagttccctggcggtaaggtggggagattgaggcgcacacctgccgaacggtaacgcaggattagctaaggcgagctcaggacagaagcctcccgaggagcaggagggcaaaataataaataaataaataaataataaataactcactccttggtctttatttgcggcaggaattcagaaggtgaaagcggggccttaggatctttctgaccttttgggttttaagcaggaggtgtcagaaatgttaccacagggctagctggcttgtggccagcaagcgttcacaatgccctcgatttttcatccctctctgtgggttctttttttcattgtaaggcagaatttctacgattgctcacccactcagagaacctgagctggtttagaccaggtgagacaggctaggtttaccctggtgatgatgtgttgttgccatggcgatcctgcccagtaccagaggccctgcagattcagatgcttggtgcctgtgcttggctgaggggccaatgggtgaagctgccatctgcgggatgatgactgaagcctctaagtcagaatccgcccaggctgagccttagggcagctccatggagcctcggctggcctgggatagagagtccaccactgtgccagcccccagccactgcctaggtcctgtgctgagagccccttgtccagggaaatggcgtccagtggaaaagggaccacccccttgcccttcactcaaggcaggttggtgacaaccctgaagctaatccgttcctagaggagctgcttctgggtccgagttttctctgcagcagagcagctccctggatgggatctgttcaaagtccgcctttcacgcggaattttccgtccttgcaattttccacctccaccactaggggatcctctctgaccgcctcatgccggctctggcctctgagcaggggtttctcttctgcatgtgcgaccttgcgcatgcctagtggccttttgggacctagagctgctccacaccccgatggggttacagagtgcctcgcctccactccaccccaccagggttccttccctggctgggatgggatttcagaagcgccgaggaacagcccagacaggtgtgggagagtagccaaggcccctgtcccggggtggccaggacagcggtggcctcgcataggacctggctgggctgctgcaatcagtgtcctgccccttggagagcaacagtgaaaacaacaagactatcttcacccaccttaagaaagaacagaaccagtatccccaactctgctgtgtatcccaacccaattccattccccaccccactctcagtagccaatatgcaaaatattagaatactcttactgttattattttcaaccacactctgcatcctgaaaaaccatatatttcgttatgtgcttttaaacttcttgaaaatgaaatactgaggctgggcgcagtggctgacacctgtaatcccagcacttcgggaggcggaggcaggcggatcacgaggtcaggagatcgagaccatcctggctaacacagtgaaaccccatctctactaaaaatacaaaaaattagccgggcgtggtggcgggcgcctgtagtcccagctacttgggaggctgaggcaggagaacggcgtgaacccgggaggtggagcttgcactgagccgagatcgcgccactgcactccagcctgggcgacagcgccagactctgtctccaaaaaaaaaaagaaaaaagaaatactgaattttcaaatacttgctttttttttcggtcaaaattatgttctcaaatttcactcctgtagatgtgcgtggctggctgtagtttttgcatttttattattaggtattctcctgttgcattaatatgccacattttatttctctcatgtttttggtgaccacttggggtgttttttggttttgtatttttgctgtatacatgctgccatggtggacatacctctttatacatatttcctgttgtatgcagacacaattttaggatgtgacatcttcagcttttctattgtgtcgtgtgtcttttccttcgtgctttgtgttatttacatattctggacacagattctttgtcaactgtatgtgctgcacatctctttcccagtttgtgtcttcttcttcttttttttttcttaaaaaaaactttctttatagtgttttttttttctttctttctttgttttgttttgtttttttgagatggagtcttgctctgtcacctaggctgaagtgcactggccgatctcggctcactgcaacctccgtctcctgggttcaagtgattctcctgcctcagcttcccaagtagctgggattacaggtgcctgtcaccacacccagctaatttttgtatttttagtacagatggggtttcaccatgtttgtcaggctggtctcgaactcctgacctcaggtgatccaccctctttggcctcccaaagtgttgggattacaggcgtgagccacagcacctggcctgtgttctttcttaagtagatgttacttttaatataatagaatgtatcatattttgcttttatattagtactttttctatctaattcaaacacatccccaagggtctttgtgtgtagactgaccaatttctcaagaatcatgaatgaatactgcttctctttccccaatttatctgtaatgctacctttattataaagtttctatgcatgtgtagaaatagttcctgatttttcactctgtgccaccagcataccaatagcacgctgtcttaaatattaaatagcagagctttatgagacaacttgatgtgcagtaggcaattgcccccttgttactcttcttcagggttctttgttgtaccacatgaattttagaattggcttgtccagctaaaagacaactgcaaggattttatttggaagttcataattctatacataatttggggaaagtattttcataataccaagtcttcctattaatgaacacagactctctctctctctcccccacccccacctgtttagttatttatatctttatggtctgttagttattgtttattgtctttcaaccaggtttcatgtttttctacatagaggccttgcatgtgaaagtctttcttcctagcttgctattacaaattttttttaattgcactttttgggtacagtggcttgtactgtaatccccgatacctgggaggctgaggcagatggattgcttgagtccagaagttcaagaccagcctgggcaacataatgaggtccctgtctcaaaaagtttgttttaaaaattgcatttgctgttattcaacaaatgtcattgtgtctcatatatggatttttatatctgataaccttgttcaacaatcttttgattctaacaatatatcagattcttttgagttttccatatagacaataatgtcatctgtaaattataattgtttcttctttgttatttcttggaccttttattttatatttttgtcttgctgcaaggcaatatccctctatatattgtggggtcttttttctcataaagtggggatggtgaacacccttgtcttgctctctgattgtataaagcatgctttctgtagcattttgtagacgctcttttttagattgaggtaattcacttttatttctggtttactgagtttttagcataaattcaggctgaatttgagctaaagctttttctggagacatcatttgaaaaattcatatgatttactttctttaagtcaccaaagttatgatttacattgaactgagtttctactgtttaactgtattcttgggagaaaacccacttgtcactgaacaatatctgttttatttactgctgtcttgtgtctaaattttcttttaggattttttgtatatgctcagattagcctgttattctcctttctgtatttttttctggtttgggggtcaaagttataatagcctcacaataagagctaagaaaccagccctaatggaggccggggcaggaggtttggagttcaagaccagtctgggcaaaatagtgagacccccatctctatgaaaaatagaaattagccaggcatggcagtgagtacctgtagtcctaggtacttgggagggtgaggcaggaggattgcttgagcctaggaatttgaggctgcagcgaactatgattgtgccactgtactccagcctggatgacagagcgagaccctgtctcaaaagaaaaaaaaagaagaaataaaaaggaaaagataaaagagctaagcatctgtttccttttttccattttctgggagagtatgtgtaagactgtaattaactgtttcttgaataatgggagaactctgtaaaataatctggctttggtgttacctgtattggaaggatgaaaaataccaattcagtttcattattggttgatagggctactcatgctttttgttttgttttgttttgttttgtttttgagaggaagtctctctgtattgccctgttgtccaggctgagatgcaacgttgttcacaggcctgatcctggctcactacagcttctaacttccgatctcaatagatcctcccgcctcagccttcccagtagctaggactacaagcatgcagcatcacatccagcctcttttcctgcctgacccagttctggtttcctttagttttctaggtgttcatccattttatctaatgtttaatgcatttggcataagggtgctcagtgtcctttcattgtctgttgtctgtaactgttgccattttcattcctatttatgagtactggcgtcttctctcactttttcttaataatcctgctggaactttgctttttaaagaacatcttttgacttgttgattcttttttcatacatattaactattttcttattttttgcctttatatttatttcttttcctgtttgaaacattgctcttttcttactataaaaatgggtaagtagctcatgaattaccacctcttttaaaaatcttttctactgtaagcattttagcagtttacatttgcccacaagtaccacttcagctacaccctatgtgcttttacataaagtcttcatttttggtaagacatattctcaaattttaattatcacttgtttttaaatccatgatgttttatttgaaatgttgtttctaaagatacattttctggttatacttttattcttctaatttagcacagtggccacaaaacatggtctgtgcagtgcatacaatcgatgagtaatttctgagctgtagtatttggcataatatatggcaaaatttcctaagttttccatgtgtgctttaaaaaacttccagtaaaatacataaatctgttagatcaagcttctcacattgttcaaatagtctatatgtttactgattcatttgactgcttgatttatcaattacaggtaggaatgtattcaaatctcctattaaagtgtgacactcaagtggctttttaaagacagagatgccaaaccaatgaatacatgattttccccaaagcctgcacaaattctctaatgaaattttaccatgaaagtttgtttaattaaggcttactaaagcagtatgttgtcttttactttttaaacagagaatatatattttaatacatcgtttaagtttatgattaattatctattactgaggataagaatctttgcctgtgctcattcagcatttgcacttcatttatgatctgccttctcatagcttctgttaatttttatactagagacatttatttgtttgtataaatgttgaaggtttttttttgttgttgttgtttttgagtcagagcctcgctctgtcacccaggctggagtgcagtggcatgatctcggctcactgcagcctccatctcctgggttaaagtgattctcctgcctcagcctccagagtagctgggactacaggcatgtgccaccaagcaaggctaatattttgtatttttagtagagatggggtttcgtcctgttagccagggtggtctcgatctcctgacctcatgatctacctgcctcggcctcccaaagtgctaggattacaggtgtgagccaccgtgcccagctgggttttttatattataaggagatgtaatagatagatagatgtttcaaagatagtcaaatgtttttaaaatttaaaacacttttttacaggttgactttcaccatttaatttcatctatgtgttttgccttagagaaattttaaatgctatgtagatctcatgacttataattatgaagcattttgttttctgttttccacgaaacttagcttaactttgagcatataatagttgtaaaggtaggagagtaacactgaaaaaaggaattgcataaaaatggcacattttctgtagagttgtttatcgcctgaaaataggccccatttcatggaagtaagatgatcaggctcaggtccccagacgaaactcttggcatggtttttggagatagtccagggctcagtactggctctatcatttgctacttctcccaaagtaaccaatatctcatccaccctgagcccatttccatatctctaacatgaggataatagcatctaccttacacaccaagtagagggatcaaatgtaggaactaaatcaaagtaccagcactgaataacctacatcctcccacttcccaaaaggaagagagatgtatcccctgttgacaaacgagaccattttgcaggagagaaaggaaatgccagttcacttgcaatgtaaacatgctctctctttttagggatgtccagggacctgagagagaacccatgcttaccaaagagtttctagttccagacacacaggactcgaagggtgacaagtatggttttcagggtccctgaatccacccagtcctcacagaaactcctaaaagctgtcgattgacagcgttgagttcacagctctggtcctcacatgctgatactgcttgtgatatcgaacccgacaggaccccacatcacaattgatttaccaactacaatataatacctcctgaatctccaaattggctcacccaggaacaaaggcttggggtaaaactggattaggagatataagctctgaattttctgagggtgagacacacaaggattctaagtgacacgccacagagtaacgggtctgtgactggaggacccacagatttgtcttactggagacaccacatgcacacaaactccatccttagctgtggaaacaagggtcttttgctatcttagccgaattctgggagtaatttttggaggggaggagatctttgggattgcctctttcaggccctttacaaaaatacctacttcttaaatggtaaagcttacactaaactgaaaaaattacatccttggctttttatgaagtaggtgttggattgaatcactactggaagaagtatggcatcgcaaattctaagcagtggtcaaaggatggatctgttaaattagaaaaatctctaaatttataaaaagattttagattcctttattctaaacaattgacctatttgtactcatgggacaatcaaatttcaaaggagatatgtaacgatttcatggcttgcattaaaaatccttctgataaaattaaagataaaaaatctgaccccctgccaaaaaaatcttttgaagttcatactgcctgctttcaatattctgtgggattcacaatgaaaggtgccttatattgtggcctagcttcaagtttatgccttcgccaccatggcctgggttcaattcccagtcagggccccagcgcctttggtttaatgtttgcgtggcatttgacttttttacctatttagtattggtgagattacctttggtaaaaaaaagtttaaagagtggaaatcgcaattctttgtgttggctaaaatctgattataagagatctggaaggttttatttttctttttcaaagagctctatggtcagaagtcggcttcatgaaaagctaatatttaattatatgtacatacagtctttctggattttctcttttgcctcctgttttgaaaaatatttggatttgagtgaaactccgttttagaaattaattgcttggtacaatatacccatgtaactaccctgcacatgtaccccctgaatctataataagagttgaaattttgacaaaataaaattagattttgaattaaaacaaataggtgcttggttcctctgctcacttctttttaaaaggaattcctctcccatgtacttcttcttttcccttctttaccttccttttggcatctttggtatcacatgaagggatctagagggaattttaagtgactctgaaattccttgagaaatacacaaaaagatcccactcaccccttttgggggtctcctgttctccttgtggagtccagagtcagggacaggctcctccaggtctgcagctctgctctcttttatttcatcttggctgattgctttggttttgtgagtaccaggcattactttgtactgtgagagacacgtcctttgtgagtgcaacggctgctgggtcactggtgagggctgcagtttggagatggctgagagccgttgcaataaatggttgtgattgcagggggctccttgtttctttgcaagtttagatgagaaaggtgcagtttggacacagtttaaaggctgtgaaaacaccaccaatgaatatgatttcctttggggatggtctgattaaaagtgggctgattgttgctgtgctactagccttgaagacatgtttctacagcattgtgcagtgtggaaaaattgtgtggcttggtcttgtggcatgtcccttcttttagagacctcagattcaatgtgaaattcgggatttttgattttcaaagatctagatgccctgccttccagatgtgcctactcttcacatattttaaaattagatcctataaactgcaaatactttgttggcttctgtgagatcagaggtccagttagaaaaggaagacagtttgttaaaattaaaaactatttatctaatctaactagattggcctccaaatatgactttctgacattcagctggttactctgaaaagatttctaaatctcttgaggctcatctatatgtttccttgcaaagaaaaaaaaaaaaaaaaaaaagcaagcccaagcactagtaagaaaaagatttgcaatgtttcatgaaaggagtagatgagtgaagcatttatttgtagatactgggttggatacctgtgcaaagaagaagaggtcaataataaaaattgccaggggatttcttggaacttaacaagctgaattaaatatagaaatgtcaggaaatcaaggcaggaaatactcacttgtggttaggcagacagggcagggttctgagcttgagatggagcaaacagttgtggtgggtgaagttcacatgctttagagctcagctgtcctagtaaagaagcctaagagtctctaaagctcttatgagaagatggattttttttgcctagattaaaaggttaaagaattgctttaagttggataaaataaagctaaatgtttaagcaagttgtgaaaggtttatgaaaaaattaattaaaatatttttgtgtgtaaacatattgactaaagttgaaggggtataattcagcatttctgtaaattgagcattgaaataaaaacacaatgggtttctcttagagcactaacctgctctttaacaaaaattgtaaagggttatagaaagtctataaaaatgttaccttatggtcaaacattaaaattgggtaaatatgtctatcaggttttattaagaattaggtttaacattaatagtacactaatgtaaaggtgaaatttggcttatttggtacaaaaatcatacaggaagcattgtgaaatataaaatgatttttagctttctttgggctatatttctataaatatgttattgatgagggttccaaagttatgggagactcctataattctgctatatctcagtgtacattatcagtcataattataattgtcatgttaaattattgtgggccacagaggtaacagatttccttgtcaattgtgtctttgactatgactaccctaaaacgttcagtcacccatatacacatgttaccttgttttggccctctttagaaggtaattttataatcagctataaagccctaacaggtgctcttaaatgcaaattttgataactttggagattgtgacatcagaagagaggaaaaatgttcgggacacttggagagctaaaatgttcattgatatcaagcaggacaggaattaactgcatgaagtgaactaataggaggctgaagtgatctttttgactttttgcttaaaacgttgctgatcctttgttttgcttttcagagtcaaggcaaattttcttttgagctattgacagcttttaacgattaatcaaaatatactcctatgaacaccatttggagcattatttgtttctctctacccgatttccccagaatttggaaactatttgtgggtattcttaatttatggcaatatagttatttgcataagtgcaataagaatgtgttttctttggtaacaggacacaatttgaaaaactggttattttaccaaggttttgaccagaatgctgtgctttcctttaaggaatcaaacttgacttgtggagctaataaagcctttggaaaactgaccttatatcctgtgaacacagtccctgtacagggttactgatctgtgggaagaaaagaatgtcacattctgacaggtcaggaatcccaagttatcttgaaacttcaagaggacaggaattcacccaaccatatgtatttgatggtagaaatccatggcaggggctcagctttaaaaagtcttatctcagattccttctataaaacaaagtcccattaaaaccaattttaaaagcctatgtgaaaaataattattcttgctgcacctcgtacaaataaagtggcaaagcataataaagcaaattggtcctgtcgtaatttgtctttagtaaaaacgggaaactggggtcgggtgcagtggctcactcctgtaatcccagcactttgggaggctgaggtgggcagatcatctgaggtcaggagttcaagaccagcctggccaacatggtgaaaccccatctctacaaaaatacaaaaatgagccgggcatgatggcgggtgcctgtaatcccagctactcaaggggctgaggcagggaagcggaggttacagtgagtcaagatcgtgccacttcacgacagcctgggtgacagagcaagactccatctcaacaacaacaacaaaaaagggtaactggagagagggaagttatgtttcaaaaacttttggaaactatagtacacctgtttttaaattctagtctggcattcagtttttattattttctacagtttgggttaaattcgtatttctctggctacaagtctcctaaataatcttttcatttgtttcctttttctttccctttttccccatttttcttaattggaaatcactgaaacctaagctgtgctttcttaaagccctgtgaactgaagactagacaaccgaaacttctgaaggaagtagcagcaacctatttatatgtgttgctgttgcctactattatgttttagcaggtgctgcctctacacccccgaaacagagagtgctactgggaacaaatcgactttttccactccagtgctgcattcggtgccccataacgatgaccccctctcagcaggaagtagccagaaagattacaatgctccatctccctatgattcttgtgataaataaatatacaagcatgatagaaatcatgcgcaaattgacagtggggattgtggcaggccagatttcactaatggaggtccccatcacaactacttcagtactgactgagtggttaagttcagtatcaaaagctgaaagtgccagcgcctttctacaaaggctagaatgtaacaaaagcccaccaagggttttacctaggcctttcctgggccttacagcatgacaaaacaaagaaggaattcttaaccagacctgtttaggattaaacaaatttaattgggggtctgaagaaactcgccaggcctccacaaacaagttcattgggggtctaaaggaaccccccccaaacctctgtgattgagcaggagacaaggtcagggtaattgccccagcacctggactcatttagatttaagtaaatgtactgaggctccagagaaaggtctccaagacttagactagagttacagattaaaagaagttaatcacttatatctttagataaatgcacactgacacgtagacatacatcttagaaaatatataagctctggaaaaccttgtaatttacagttggtctggagatattttctgggccttctctctgtaaccggttccagaaataaaaaactctcttcctccccagtttatctgcatctcgttattgggccgtgagaaatagcagccagaccctgagtttggtctgggaacacactggctgggcttcctgcctggcggtagagcttcactgtcctccttcccagccaaaatgtggcccttgaaggcttcctccccaactgaccggttttgggttctaggtactcagggaacaccgtcttcaaggaggccattttcatactgttcctggtttgatttttctgaaattaggaaatgccccttgaggcatccaggattgtctttatttcccctgaagcttcccctcctgaagaaaaaagttctcaaacaccctcaggactcaaaccccaagttcaccctgtgaaacattcccatttcctaaacccaggcaggctcatggccctcagcctctcagaccccatggaaacctcctcccccacttcacgggttctctccatattgagagcctcccctcctcggcacacaacccagagactcaccccaacatgtgtagcaaatcaccctggaaacaatcatggctgaacgtggtagcccatgcctgtaatcccagcactttgggaggcccaggaggtggatcacctgaggtcgggagttcgagaccagcgaggccaacatggtgaaacctcgactctactaaaaatacaaagttcactgggcattgtggtgtgtacctgtaatctcaactactcaggaggctgaggcaggagaatcacttaaacctgggagacagagattgcagagagccaagatcgcaccattacactccagcctgggcaagaagagtgaaactacatctaaaaaaaaaaaaaaaaaaaggaaaaggaaaagaaaaaaaaaatcatgaggcaacattgcatttaacaatattttatttatcaaaagacacttgtctttctcaggtaagtgaaggtctagagatgaaacgagtcccgatgtaaattgccccatgggcattgctgagatcacaagatcatcactgcagcatgcagcacaatagtaaatttctcaggatggaagttcaacaatccaaaaggtagtattttttttcatgatgctcagtccatcatacgaaataaaaataaattccttttcatgatcatccattcagtagaaaaaatgatagtaaatttgttctcatgaagatttttaccgtaacatataggatttatcgttattattattattctttgttttttgtttttttgaagcggagtctcactctgttacccagtctggagtgcagtcgtgcgatctgggcacactattaacctccacctccagggttcaagcatttctcctgcctcagcttcccgagtagctgggattacaggcatgcgccaccacacccggctaattttcgtatttttactagagatggggtttcaccgcattggtcgagctggatttgagctccggacctcgggtcatccgcccatctcagcctcccaaagtgctgggattacaggcgtgagccaccgcgcccggcctcaatttatcattattcacgcatccacaaactgggttcttatattttgtacgtgattttttccattgaggagagatatctgtgcatattcatgctgctcatatttcatccacaaactcggttcatatttcatccacaaacataattttttccgttgagaagagatacttgtacatatttatgctgttcaaattcacatttcatcattcttttacaagaaatagataatgtattttaaggttttccagtggtattacagatattttactgggtgtatagatagaaattaaaccaaacttctttgttctggccgccagtcatgcatcctgttttcaacatagttcacatacaactggttgtgtaaaaatgaaattattttgtttagtacaatcatcaacagttggttgattagatttttaattatcaagttaatcattgtcattatgcttctcatcgcactcgtcattaattgctgtgggaggaaatttgttatgttccctatgagagggtgtatcacaaattcaaataagaattcaacgacaatggactgtataaaggaaataagcaagtccatggaaaacatatttttttccggaaaggattaaaatatttttaaaaaggaattaaaaaaaaattgggcacggtggcaaatgcctagagtcccagctgctcaggagatggagacagaaggattgcttgagcccaggaataagttggaggctgtagtgaacagtgattccaccactgtactccagccagggcaatagagggaaaccctctttctaaaaagacaaaaagaaacaaaacaaaacaaaaaaacaccacatcaaaaaacccaacaacaaaatgaaaaaccaaataacagcaatacaattggagctattcgatccaaagaagtaaatgaaacataaagcaaataaaagagaaaagctaatacctgtgtcctgcaggactcagtccaagttctgctctgactccctcctggtgagccaccccttaaaaagtcacttggggcggggttactttgacagacagtcttctgtcaaagagggaggcggtaaatagcacttttttttttttaatttaacgcctttccaacaaattagcggctatgttgtctaagagtgcaaatgtcagaggtgggtacaggcagcaagaccctccccacaggggcagcagaaggaggaatgactaagggaacaagactttagtgtgctcaactacacaggacaggaaacagatgctttttacaaaagctggtggacttgaaggcagaatattttcaagttcctgtaactgcgaactatgacctgtagcctgtgagagtgactttctgtggcaaaggagcttttgtgaatgtgaggaagttaattatcttaacagtgggaggttctcccggcttatctagctagaccctcgtgaaatcccaagtgtccttaggaaggggaagcagagagagatttgagtccagaagaggaagaaggtgatgtgaggcccagtaggggaacaaagggcgatggcatgtaaacacttagcccccagaagtgggagagggctggggttcatcacaccagaatccctaacaatcagccttattttaattacccttgaaatggaaggaggccttagagagccagaggcttggaggggcaccctctgctgcatacacagatcccaactgctgtgggctccaaataattgcaccagggaaatcacaaattatcaaaaataaaggatgtaaagcttttaaaaaatattaaaagcccaacaaataaaaaaagttctaaatctataaaattgacctcagtctgtatatttagatgagtcatgtgtatatagcgtttcacttcaaaatatatgataaatctctcattcattggcttaaaaataaacacttcaatcaagtctttatcagaaaaattgaaacgttaactcaattgccttttagttcatgtgactttacaaaacttaaaacaataaagtcagttttaaaaattattagtaaagtaaaagaaaaatatcttcacaatgtagacattttgtccacatgagacatgtgaaatattgccattactaaatatttgcaggtcaaaaactgtttccaaaacattttaaataatcatctggcctgtctgttttagagcattcaattctagctgaggtctggggacatgtgaaaggagccacggcccgactccgtgctgggaagagtcagacattttccacagctctgtcctttgctgtgggctctgcaactcctaccaattaaaattgcttacgtttttgttttatttttactaaagaggggttcctaaaagctaacattatactgagtatatgtaactaaaactactaagaaaacaatttcacaattatacaaatgtgccaagtaaatgaaaaaataaactgtattttaataaaggttataaaaagaaaaacatatagtggtgtgaggactgtctcaggtcttcactgagcaagggatcatgacattctatggcggacagctgaccttggctttctgctcctcttgattatgtctactaagtgacatacttactctttttccacctgtcttgcctctaagggtaacaggttttatgagatccctcctagtgctttgcaggtcagcctccctttgctgcattccaattttactgcctataccctccagctggcttttgatgacaaaagtcctggtcccagccattctcagattctgtcatccccgtgggcactatggagctcagcactatgggaggttccccaaaaatctcgttttctatgaggaatggccaccacctgcatctcagtgatgctagtgacccctttcctactcctgtgctcactggtcctcatgaagatcctggttggtctgtagccccctatttttcctattaaagagaaattacagtaagacccatttgtgtgcaaaatcaattttaggcttattacacttggcctgataatttgcataaaatgcagcaagaattcatcggccatataggctacttttgagttaattttcctgggtttttacctaaaaatatactattttggttagagtcttgtgaaaataaccaatgtgttcaattgttttattttaaaaggctcttactgaacactataaatatgtataagttgaatatacaaactatattgtcataaaatcacaacccaaaatgtggagaacgcagagggaaaggtaaatttgctcgcaaaaacatacttcacccaaataactggaaaaaaaaaaagactttcatgacccttctttaaccagagcagcagctttcaaacaaggtgtttgccttggaaatgccattcacaagccaaacggcccttgagagctgtctgtcaggcactgtagaatctagcagctcctcacagagttagaaatagtttcaggaaagagattccctgcttttagtaactgcactttatattcccagatagcgagattgtatgtaaaccatttttatcttattctggaactcttttgggtactttttttttttttttttaaatgatggagtctggctctgttgctcaggctggggtgtagtggtgcgatttcagggtatgagaaaatgcagctggacctggctctttccaggaagaccctcacagccaaggagtccaaagcctggggttttcatctaattccagtgtgactggggtaggagcagctttggtgctgggtgtgtgtgtgtgtgtgtgtgtgtgtgtgtgtgtctatgcctgtgtctgtttagggtgttaggctcgtggttgtctagatacaaatgtcccagggctcaggagccccagggttatgtcaggggcaccagatgaaggtgtcaacagaagttagggcacaagggacaaaggtgagagcaaggttagattcatttaggtgcaagaaatcatagagggaggagggagaggaagccctcctgctaccaccgaggaagaagcgcagcttaaggcagaaagcctgtccggagaggaagtgagtttgagggcagggctctctgggtaaagtacggtctgggacaccagcctgggggaagggtacagaatgcagagtggcctggcgtggggactaagaacagaggagagcagctttcactgggagggtcagtgttttcagtgtccagcactgagcaaggtgagatttgggcagcttgctgtgaaataaggtcaggctctggcattgtccccattgcgtgtgtgtgtgaggggcactttgggagagtgaactctccacctccatcctctcatacgtccttcaaccgagcttgccagttaccctgattccaaggagatctatttattgttgacaatactggatcctagcagaggctgggtaggagcctgggcacaagcaagtggaggagggggcctgggcctgaaagacctgggaggtttgagagaggacacagcccacagaatggagcagatggggtagagtcggcaagcattcagggctcctagtaagttggacaatggagaccctgaaagatccagtaaaacggggagaacaaacaggtccccaactcacatccttgcagtgcctggagcttcagactccagacaggtggggaaggaaaattgagggatgtgaacatgttggagaatgtcgtgccctgaagaatgaagaaaaggggggtgaggaatgagagcaggaacggcttccagtgcctggtgcccaggagaactcagaaaatgggtgtggtggagaggaatcgaggaaccggaagtggtggaagtgtgcagggcccctccgagatcactgtgactgccaggcgtcctccctggctggagagcttcactgtcctccttcccagccaaaatgtgtcccttgaaagcttcctccccaatggactggttctgggtcctatatatttgaaggggtggcctgcctctccacacctgtgggtatttctagttgggtgggaggagagacagagaaaagaaataagacacagagacaaagtataaagaaacaacagtgggtccaggggaccagcactcagcacaccaagggcctgcaccggcaccggcctctgagtttcctcagtttttattgattattattttcattatttcagcaaaaaggaatgtagtaggagagcagggtgataataaggagaaggtcaatgaaaaacatgtgagcaaaagaatctatatcataattaagttcaagggaaagtactatgcctggacgtgcactcaggccagatttatgtttctctccacccaaacatctcagtggagtaaagaataacaaggcagtattactgcaaacatgtctcacctcccgccacagggcagcttttctcctatctcagagttgaacaaatgtacaattgggttttacaccgagacattcagttctgaggggcaagcaggagacagtggccttcctccatctcgactgcaagaggctttcctcttttactaatccacctcagcacagaccctttatgggtgttgggctgggggacagtcaggtccttctcatcccatgaggccatatttcagactatcacatggggagaaaccttggacaataccccgctttcaagggcagaggtccctgcggctttccacagtgtattgtgcccctggtttattgagactagagaatggcaatgacctttaccaagtatactgcttgtaaatattttgttaacaaggcacatcctgcacagccctaggtcccttaaaccttgatttcatacaacacatgtttttgtgagctccaagttgggtcaaagtggctgggtcaaagtggctggggcaaagctacaaattaacaacatctcagcaaagccattgttcaaagtacaggtctttttcaaaatggagtctcttatgtctttcctttctacatggacacagtgacagtctgatctctctttcctttccctacatatattcatggaccacagtcttcaaggagtccatttcctcactgtttttggtttgatttctctgaaattaggaaatgccccattgaggcacccaggattgtctttacttcccccagagcttccactcctgaggcaggagcttctcaaacaccccccaagactcaacacctaatttcaccctctgaaaccttcccatttcttaaatccaggcagggtcatggtccttagcccctcagatgctgtggagaccttctttccctttcatacattctctcaagattaaaagccacccctcctcagcacacaccccagagactcaccccaacatgcattgcaaatcaccctggaaacagtcataagaccacactcatttaataatattttatttatcaaaagacactctttctcaggtaagtgaagttctggagaggaaaagaggagtcctgatgtaaattgccctgcaggccttgctgagatcacaaggagattgttactgcagcttgtagcacaatagtaaatttcttctctggatggaagttcaacaatccagatcgtagtatattccttttcattatgctcagtccagcaaatgtgatgataacaaattccttttcatgatcatccattcagcagagaaaatgtttgtaaatgtgttttcatgaagatgtttaccataacatacaggatttaccattatcaatgcatccacaaactctgctgttgttttttatacataattttttccatcgagaagtgatagttgtacatattcatgctgttcatatttcaaccacaaactctgctggtttttttatacgtaattttttccattgagaagtgatacttgtacatatttgtgctgttcatatttcatgtttcatcatccttttacaataaataggttatattgtattttaagtttttctaactgtagtgcagaaattgtactgggtgtatacatagatatcaaaccaaatttacttgttctggctgataatgcatcatttatttcatagattatgtatttctttgacacatttcacgtacaactaattgcataaaaatgaattttcttttagtatagacatcagcatgtgcttaattcggaatttaattgttgagttaaacatcgtcattgccttttccgttgttattaattgctctggtgggaattttgttatctcatacataagacagtgtgccacaatatctcttaaaatttcaatggcaataaactttatatttaaaaacagggaatctatggaaaacacatttttttctaaaggattaaaatatttttttaaaataattttctaaaaagttaggcacggtagcaaacgtctagagtcccagctactcaggaggctgagacaggaggattgcttaagcctacgagttgggggctgcagtgaactgtgattgcaccactacattccagccagggcaatagaagttaaccctttttctaaaaaaaaaaaaaaaagaaagaaagaaagaaaaaaagcaacaacaccaaaacctcaccaacaaaatggtaaagaaaaaaaaaacagcaatacaatgtaagctatttgatccaaagaagtcaatgaaatttaaaacaaatgaaagggaaaaagtaatacttgagtcctgcaggactcagtccaagttctgctgtgcctccctcacggtgagccacccctttagaagtcacttgggtcataagttaacccgataggaagtgtcctggccaatgaactagggaggtggtaaatggcaccattttaaatttaaattcacggccttttcaacggatcagtagccatgttgggtaagagtgcaaatgtcagaggtgaaaagaggcagcaggaccctcccctagtgcttgggcaacagaaggtggaatcactaaggggacaagactttagcatgctcaagtacacaggacagaaaacatgctttttacaaaagctggtaaatatgaagagggaacattttcaagttcctgtaaccaagaactaccgcctgtaaccggtgaaagtgactttctatggcaaaagcgtttttgaaaaggtgaggaagttaaatatcttaatgttgggaggttcttctggtttatctggctagaccctaatggaatcccaagtgtccttatggagcggggagcagagagagagatttgagtccagacgaggaagaaggtgatgtgagtctgggtgcgggacagggggagaatgatgctatgtggggatctgggctggggaatgacttagctgcatgagcggagtgacttagactcctgaactagaagaaatctagggctcatcacctcagcagccctaaccatcaaccttatttttattacaggtcttccatcgacggactccctaaaaagccagcggcgtggaggggcgccctctattggacaaatagatcttgactactttcggccctcaaatagcctgactaggcaaataacaaataataataatttttttttaaatcatggaaaatattttaaaaaacaattaaaaagttataaatctataaaatctgcttctgtctgtgtgtctgtatatttagatgtctcatgtgtacataatgtttcactaccaaaatatatgatgaaaccctcattaatcggcttagaaaactaaacacctaaatattttctcagaaaatacaaaaactttaactcaaatcccttttaattcacctgactttaaaaatctttaaaaaataaagcatgctttaaaattattagtaaagtaaaattagaacatcttcagaatttagacatttggtttaaattatacaggtcaaatactgcccttagtaaatattttcaggtcataaacaactcctgtaatcttttaaataattgaattacatgtctgttttagagctttaagttctagctaaagcctggggacaaatgaagggcaccatgccccctctctgtgctggaaagagacattttctacagctctgacccttgcagtaggctttgcaactgctacctatcaaaattgcctacatcctaagtttattattaaaaggagttgcttggagttaacattataatgaatatatgtaactaaaactatttctcatacaaagtatatgaaaaagtagaatgtatttttaataaaaagttataaaaagacatgaacatgtagtttttataaaaaacagtaattttgtctagttttgcagttctaaaaagttatgttaaattcaaaaataaaaaataacaagacaagactcaaggtttaaataagttgtaaaagatttgtaaaaattagttctataaaaattttacaaaaaaaagcattggttaaaatttaaggaattattttgtttttacagaaattaaacattcattaaaaacactctgatacaaggccttaatttgggttcatgtatcagaatagcagggttttcttagaatattaatctattctttaaaagaactatgaatgttatgcaaactttataaaaatcttaccttagagtcaaactgattaaaattccatagattttacgtaaaattttattaaaaattaacttcaacaaaaataaaatttgattttctcctttaaacaaaagttttgcgtaatattaaataataaagcatttttgtttaccttttaaactataaacacacacacacatacacatacaccaacactaaagtcagctgacctcatactgtctttattggatattcttgtttaaaaaactatcttctttggaaaataaagttttttattttaaaccatattttaaattatcattttgactaaatccataacatacagtgatctgtaataattctattttataatatcaagtgttttgaagaactccaggaacagccatgagagaacactgtggtttagtaacactttatttcctcagtttgaaaatagttgtctttcttggggaggccggtttcagcagatgaaaacaagagtcatgatgaaaattacccagcagtggttagtgtgaccataggaacattgtcatcaggtcagcagaaaacatatcagcaaatttttctcatactggcagtgtgtaggggtggatgtttacagttcctgaagccccagtggtcgtgtggtcttttagttttgccatttataggcaacttgtggtaactagctcaattagacacattccttatcacaaggacagagggctttctgtatcctagggttcttgccttggcattccagaagaatcaggtcacacgtggacgtggagaatgagtgcaaggttttattgagtggaagtagctctcagcagatgggggagccagaaaggagattggtttctccctggattggggccgttcagcagccctggctctcctctgactgccccaggcaaaatccacatcgttctataagtcggtgccctgctggtgtgctggtgcctgttgtcatgttcctcttcatgtccagccgcctgtgtgttcctccgctgatgtgctcctctcgacgtcaagcctcctgtgtgtctgactgctagggtcttggggtttttataagcacaggatgggtcttagcaggccaggatgatcttgggaaagacaacattcggtcaggaaaacaaaaatgcctgttgtcatctaggtccgtggggacaagcccaggtgtggagcttttagccagggaccacagcctcctgtatccaacacttcccttcaccttttctatatcattcaaagggatcatgcccttcccatcccagcacttcactttcatgtcatttgccccctctgaagaggtacatctaactgccattagaatatggatgatgaccagtcttagctgcttcctgctgaaagggggcattgttttgggggaaaacggcagtcagattcctcccaggggtctctataataaaagatcgaggtggctactttcaggaggtcctctaatgtactatctggtcccaagtcccatttctgcaacctcctcctgatgtcaggagctgcctgagtaataattttatcctttaggattatctgtccctcgattgaattaggagatagagaggtgtgatttaccaaggcctctcttagcctctccaggaaggcagtgggattttcatcaaatccctggttaattatggacaacttagtataattgagaggcttggtcttagacctacgtaagccctctattatgcacacctgaaagtgtctcctcttccagtcttccatctcattattgggatcccatttagggtccttcactggtgctacttctcttccagttggataatattcgctcccttccctgatgctataggtgatgcaaagctcatccccaaatctctctgctgctggcagagcagcctgcttctcagtgtctatcaggttctgactcaaaagtaacataacgtctctccaggagagttcaaatgttagggtgaaattctggaaagcttctatatatctatcagggtcatctgaacacttgcccagatctcccttaatttgctttaagtcttgtagggaaaagaggacttggaccttactgggcccaaattcactgggcatctgtaggaggggcaagagtgagactgggcttgtttgggatgaagatttctaggaggggccaggtgagaggctgaagctggatacggaggttggggtggacccagaggagcagggcttgagggagctggcacgtcagctgggggtgcgtctgggactcgtgtctttaattccctgggcttgaccctggcagccttccccgagacagcaaacaggagggctggaacaatcctacatgtcagcaaaggtctggattgctttgcaaggtatagaaagcctgcacatttggggcctcagaccatgtgtcctcacatccagagaaaagttctaattgcaggatggtattgaaatgaatggtcccttcctgaagccaagccagtccttcctgtaaaccataatttggccaaacctatgtgcggagggctatgagatgcttttcctctggattctgagggtcaaaacagtcccaatggttcaggatacactcaaggggagtacaagctgggggtggtgaggagaactggctgcccattctgaaagacagggaatagaggtgttcctcatttcccttccttcttttggcaaaaagctcagggtgtgatggggagggaaagcaagcatcttcacttcactttccacctcttacccctgcgccctggcaaccttggcaggtgccggccacaggtacaaatgcggtatgtacccatgaagcagggagaacctggagattaggaattaactgccctcacctatgtttccttttctccctgctgttgaaaaactttgagttccctgggcctttttatcccatgaggcatggcctccttctgtgggatggggttcagtcagcaggaattggtcctgtccatttacattgtgcctgttgcctggctttgaattcctcagacctgctttctctttctagggcctcagcctgaagcttggaattgagtttgggactgaaaaagcatttcagaggctgtttatatccatttagtgcctcaaataagccctgctgaatttgcaattatcagccagcaggggtcactcctctgttaacttccctattagaaacagagcggtggggattctcacttagaaaagaaaaaaagagaaaaacagttaaagaggcaaaaagtggggaatgctgggggaagaaccccttgcttagtgcaagtgggcccctctaatccttataactttcccatccttcccccagttcagaccaggttgaattccttggccatggaaggaaaggttccattgatgcagtgggtgagaagcactctgtagggtcctggctaccatcggttttctcacacccccctcatcccaggcagtggagggagacacttctgcgacattgctccccctgccccttcatggctattgggtgtggcctttgcctgctgcaggcatgcctaggtgctggagctgggagggaaaagggtaaggagaggtgccctggaagccgctcatgcctggggctgtcaaggtggaggcatacatggcacctctaggaaaaattggtctgatttgcacctttggcggctgagccaaatgctcattttacttagtaacattgcctcagcctgtagcaaaactcttaacattataaaggaagagataagatccatttcaaataatgtgtgagagagaaaagagatgaaaggaaaacagagtcttttacctgcaggaaagggagagaagtggcagagttttggaagaaaggcaggcccaacagtttcccattcactcacactcaccttccgagatcccagacgagccaccagttgaaatgggaaaagtttccttgtccccctcacaggaggtggagtgggggtgtggcttgcttctttagtactccgctgctcaaacctctagggaagcatacagactggcaagttgtggggctacaaccccatggcagcatctaggggtagatgtttacagctgctgaagccccagtggacatgtggtaccatgtgctcttttagttttgccatctataggtggctttgtggtaaccagctcaattagacccattccttaacccaaagacagagggctttctgtatcccgcggttgttacctaggtgtaccagaaaaatcaaatcacacgtggtcttggagaatgagtgcaaggttttattgagtggaagtagctctcagcagatgggggagccaaaagggagaatagttttcccctgaagtcgggttattcagcggcccaggctctcctctggctgccccagccaaactctatgtcaatccattggtcggtggcctgccagagtgctggtgcctgttggtggattcctctcagcgtcgagagtttttccctctcaggaaagggagagaagtggcagccacccatgtgttcttgcactgatgtgctcctctcgacgtccaacctcctgtgtgtctgcctgctagggtcccagagtttttttaggcacaggatagggcatggtgggccagggtgatcttgggaaatgcaacatttggtcaggaaaacaaaaatgcctgtcctcatctaggtccaggggcacaagcccaggtttggagccctagccagggaccccggcctcctctacccatcactttccttcaccttttctgtatcattcaaagggaccatgcccttcccttcccagcacttctcttctgtatcaataggtgatgtttttaaaatttcccaactctagtgcaggcatggtactagacatatacatagaaataaaaccacacttattcttctggctggcaagacatagtatttttgccaaattatgtgttgttttgaagcattttatgtacccctggtcatataaaaataaagctattttgttcagtacaaacagcagcattttctggattagaaagttaatcatcttaaaagatcatcacggatttttccattgcactcatcactaattgctttggcaaaaaatttcttatctcacgcatgacaaaatcagccgcagtatctcctagtaatttaatggtgatgatctttataaaggaaataagcacatcaagggaaaacataattttttttaaaaaaagagtaataaaactttttaaaagtcttttttaaaagactgcttttctaaaatagtaaaataaaactccaccaataaaaccaccaacaaaacagaaaagaaaaaataatgatatgatcggagctatttgatgaaagatggtaaattaaatttaaaatgattagaagagaaaaagcaatacctgtctcccgtaggtctcagtccaggttctgctatgcctttctcctggtgagccacctatttaagagtcgcttaaagcatatgttaatccaacaacagcagattaaaaaccaatgcaatctgaactatttgatctaaaaacataaataaaatttaaaacaaataaaagagaaaaagcagtacctgtgtcctgtaggtctcagtccaagatctgctctgactcccttgtggtgagttagccctttagaagtcacttggggtggggcatatgttaattccactaacattggttctggccaatgagtcaggaaggtggtaaatggcaccttttcttcttgctgatttctttcagttcctttggagtctggacattagtcctttgtcagatgcctagtttgtgactactgtttcctatactgtgggttgtgtgtttaccctgctgatatttcttctgccttgcagaagattttcggtttcattaggtcctattgatcttattctatttttatatttttgcgtttgcttttggggcattagtcatgactacttggcctaagccaatgtctagaaaagctttttggatgctatcttgtagcatttttagactttcaggtcttagatggaagtttttatatgctttgttaaagatcaggtgactgaaagtaccgggctttgtttctcggttctctattctgttccattgctctatgtgcctatttttatacttcctgcaccatttattgaataaagtgtcctttccccaattagtgtttttgcatactttgttgaagattagttgtctgtaagcatttggctttatttctgggttctctattctgttccattgctctatgtgcctatttttatacttcctgcaccatttattgaataaagtatcctttccccaattaatgtttttgtgtactttgttgaagattagttgtctgtaagcatttggctttatttctgggttctctattctgttctattgctctatgtgcatattttataccagtatcatgctattttggtgattgtagccttgtagtataatttaaagcctgccttcagatttgttctttttgcaaagtattgctttggatatgcggtcacgtttttggttttgtataaattttaggattcttttttctagttctgggaaggagaatgatgatattttgatgagaattctactgctctgtagatggctttggagagtatggtcactttcacaatattgattctacctattcataagcttataatgtgttcccatttgtttgtgtcaactgtgatttctttcagcactattttgtagttttccttgtaggaaacttacattaacctacttggttaagtatatttctaagtattttacttattaaaaattctcagggaaatgcaaagtaaaactgaggtgggaaattaaagaaaaataaaattaaaaagaaagggaaataagctttcttgtattaagctaacttgtcccagaggcagcaacaggcacagcccagacccaggaaaagtcttgataatattatttattgtattctggagactcttccagcactccttcaatgtagggagaagaaaaacaaattttcctttgttttatggtatgagtttatagattcttgttctctttaactagtaacttcaagtattctgttttatctaagaagtatggcaaaggtcatgagaagcctgagcaggcctgaactacagctctctaggcaccatagtgaagataaaccaatgcaagcctctttagagcaaaacctagataatagacatctgggttgcatagcaacagttatgtgcaatcctgagttatgaacctgttacaatttgattaactgtctttttcctgcctctgtatccctgctttcacaccactgtaagcttgcttcaagctggcccacccccttttgtgaagtgtgtataaaagtcaagtgctgtctttgttccaggccctgtctttggacgtgagtctgctgggcctgagagcactcaataaaagattctcctgttttaacccaaagcctctctctcatcctcctaaatcccacaacaaaaccacaatgagatgctatcttaatcttgctagaagcccataatttaaaagtcagaaaacaatagatgttggcatagatgtggtcaaaagggagcactttgacactgctagtgggaatttaaactagtccgaccactatggtaaacagtatggggattccttaaagaactaaaagtagaccattcattccagcaatcccattactggctatctacccaaaggaaaagaagttattccataaaaaagacacaagaatatggatgtttatagcagccgattcgcaattgcagtgatatgggaccaacttaagtgcccatcaacgaacgagtggataaagcaaatgtggtacaccatggaataatacttgataataaaaaggaacaaaataatgtcctttgcaacaagttggatggaactggaagccattattctaagtgaagtaactgaggaatggcaaatcaaatattgaatgttttcacttttaaatgagagttaagctatgagaatgcaaaggcataagaatgatataatggacttggggactcagggggaaaggttgggagggggatgaggaataaatgatgacatattgggtatattatacactgctcaggagacagatgcctcaaaatctcagaaattaccactaaggaacttttatccacataaccaaaaaccacatatattccacacactattgaaagaaacataaacattattttaaaaaataaagccacttttaaaattagcaaaataaaataaatatgtcttcagagtttagatattggatccaaattagacagatcaaatactgcctttactaaatattttcatgtcattaacaacttctaaaacctttcaaacagttttttgacatgtcttggaaccatccatttctagctaaggcctgggcacctgtgaaatagggccatgcccccccttatactgggaagagtaagatatttcaagactaagatgttttctacagctccatctttttctttaagctctacatcaaggacataattaaaattggttgtctcctaagtggtttactaaaaatgcatacttaagagttaccattataattaatatttgtatctaaagctacttaaaaattttcacacacaaatctgactgaacaagtaaaatatattttaagtcaaagtttataaaaggacatgagaacatagcttttatgaaaaaattagttttgtcaagtttagaggttttcaaatattttaaattcaggaaataaaataacaaaaagacaaaagaaaatggttgaacaacttagaaaaggtttgttaaaattcatcttataaaacaatctacatgtaaaaagtgggctaaaatttgaaagagattatttaggttttccataaattaatccagaaggggtaggaagtcttaagaatgaggaaggacaggaggaaggggaggtcatcctgacactgcagaggcagaagtgcagctgaaggtatgaaggctaagaggggaggggagtttgagtgctgctgcctggctgtcagagcagaggagggtcctgggcaccagacttgaggaagggatgaaaatgctgggcagacctgtagtgggcccttgagatggcagatagtggtttccagagagagggccattgttttccagtgcccagcactgagcagagagagttttgggcagtgtaaaaaaaaaaagagaacttacctctttctcgttttagaaaaagaacagtctaagaatatcagcagggaaactctcagtgcttcaaggggttaaacgcccttttggctttcttgtgttggtttcatcatagaggaggagaaacttcttggaagtgttcctaaaaacacaacacgtctgcttctcctttcaaaaaaggaagtgctaaaacacgaacactctagatccaaatattaatacggatgtctaaatgcttccgttttccaaggggcagaaagctaaaggttgtaacctattcatttcagtcaaagttggtgaaagggaagcaaaggaactgggtggggcttggaaggatgacgaagctcaagctcattggccagcaacctctctcctgggggcgggaggggtgagcatacgtcattgctttggcttctataaaatgaggaggactcaccgagtgtgaagagtccttctggtgattgcagctgagagcacactcacgacgttctgcaaggattctctgattatgattctgaagggaaaagcgatggaatggacagcagagattgtaattttctttatcttgaattacggaagaaagtatctaggacagaaatccacgacaagtccttggaaccagcagatctcttcgttcacggagacgttgacgtattctctattgaagaagattcttaccttcttactggacaaggttttgtcagttctgcgtgactggattgtccgggagactctgaggaaactgatgtcacatgtttttccaaagaagatgtttctggaaccaacaactgtgattgtggtttgaggacttctgagagttccagtacaggaaataagcagaacatcagctggaggctaaacggatccagacttcactcttcacttcccttcctattcagtctattgtgcctgctgactgagaagcttggctggtatgtgagcaaataaacggaactattcagaaggagatgttgacatattctgtattgaagaagatccttatcttctcacctgacaaggttttgtcagttctgtgtgactggattgtccggaagactctgaggaaactgatgtcacatgtttttccaaagaagatgtttctggaaccaacaactgtgattgtggtttgaggacgcctgggagttccggtatgcgaaataagcagaacatcagctggcggctgaagggatgcagcctccactcttcacttcccttgccattccatctattgtgtctgcctgactgagaagcttggctggtatgtgaggaaataaacggaattataaacaaggagattgtttctcatctacttcattctgttgtggcttttctattttggggttcagggtgtgtgacaaggaccaaggagatgaaaggtttcatgatggagaaagcccaggcaatcagattgaagagctatccacagggaatcttggctgctgaggggctgcaccctgcaacggactgaccatatgacagaaaagggttttaaaggctcaacttctggactgagaacccagagtaatttgggaacctcctctgtgaggagatatgaaagctgggaatcatgacatccctaggaatggaaggcacatttcctgatggaaggggtgctttggaaaacaggagcagagtagacacagcagccttgtggatacgggtgggcagcatgcatgggtgatgtgaacgtggagtgtttgtgatcgaaactcaaaatgtctgacaaagtgaaaacctagaaaccacaatgaggaggaagagtttgtgagggcaatcactctccccatgtgtgaaaatcgggggctcttaaaatctcatctggagaggtgcagtctaccaaactctgggactttagcctccccttttaaaaaaccgtgcatcaataccaacgtccgaaaccacagaaataacacctggcttgcatggagacaaggacaaaaagccgtcatgatgagttgttctgctcacttgctgcctctgttcagtgcacaggatattgtccacccactagcaggctactgcaagagaagtgtgcaatatgttccctatgtgccatatatgtgccatatggcccatatgacaactgagtcagaaaatatctgatgccctcagagttacactccacctggagcttgcccccagccatccaggacctaggctccctaccctgtccaattttctggtgttttgggggcttcattctctaaggtgtgcccactctttactcaaaccaaaacacccacatattcctgcccatgaacaaccaatcaaccacttctcagttccacatcctgctgttgggtctctagtggtgacactgtaactcccaggtcatagtggtgacactataacacctagctaaattgatgccttgtctctaggaggccatgggctcctgcaggtctcatctgactctctgtagccttccctgacaatgctcacaatacccaagccagagccacattgacagcaagctgctctcatcttacctttgccagacctggccactggaaaaggctgaccctcatcctgcaatgcctatacctccaacctttgtctcaagctggtgtcctggagggacttctaagcagaaaacagattcagactcccatcctctcctgaatggcctcatatccaattctcagaccctcagccttcattgtaaggacacttcatccatgcccttgagtattctgtctgcactgtgtattctgcaatagattctcctccctctgcgaccctcaactccttccgcagactttttgttttcttgatcatctaccatagtcttccactgggacactgccaagcccattctggagagtgagttgtgcaagtacactgccccccatctacctttcgggaggtgtatacacccttctttctcccaggtctggaggctttctattttcatcctgaggcatctccacctgctcttggattcttcaaattgacaaccaccagttaacaagaactatgtgtcaccaaatagccaaacaatggcaattacaaaaataaaattaatagctgtaacccccattagcaaggatacacaaatcaaatcagggatagtgggtgaggaagtctgcctaacattcaaggaaggattctgaagtgatacaaaatcattgcctttgctatctttagaatggacactttcagccaggcacagttgctcagcctgtaatcccagcactctgagagccccagttgggtggatcacttgaggccagcagcttgagaccaccctgggcaatgtgcagaaaccccaactctactaaaaatacaaaaatagccagttattgtggcacatgcctgtaatcccaactccttgggaggctgaggcacaagaatcacttgaatctgggagccagagtttgtaatgagcgaagatcatgccactgcactctagcctaggcattagagtgataatctgtctgtggaaaataaaaacattcctcttcaaagttttcttctttaaatcataaatgttggaattaatatatcctctttgaaactcactttcttcaagcttctttatttgatggtagtaaatctttgttaagctttatgaggcaagagtaatggaagaagcatattatatatatttatactctaacctcagtgcttgttctagcaagctcaggcatgcgtgaatgtgcccaggcatgttccagcccataccttatatcctttccttattgggaaatgctgttactcctataagcattcttgtaagcaacttcctctttttctttgtctccactatctttacctattgaggacagttttaggttcttagccagttggatgtagcatagactgtgaggtccaaccccagccaatggagatagcacacagcagtagcgacctcatgcttaacagataaatattcctgtctccctttgtttggggtgctctcagctgatgagcaacaccctttctaaagaaattaaagttgtcttgctgagaaaacttttggtctaaatgctgattcttccttgcagcactgaagaagaagcaattatttccaacactttctcatacacaaaaaaagaagaaggtggaagaaaactttcttgtgcaccctatccctcactcagaaagacaacagaaggctcctagtggcaagccctagaggattcatttcttttgggaaccctcttggctgggatactaggactcaggtcaaactcagcattttcagtgtgtgggaagtgtgcttgggtttcactgttacttccaataatgtgatttggtccttggggttcaccaaattttggtatggagtggtgaaccctgttaagtttaagtgtctataaaattaacaaagcaaaataaccattctgccccatggttcagagaccaaatattgtgtaggaaatgctttagcgagagaaacagagaagaataaaaaatgtcctcaagcgctgcattatttcttgttatcgtccagatcttagaggaaaggctttcattttccctcattcagtatgatattagctgtgcatctgtcatttatggcttttattatgttggggtatgttccctgtgtatgtagttttttcagggtttttgttatgaagtgatgttgaactttatcaaacgtttttcagtttcagttgaaacgatcatatgctttttgtccttcattctcttgatatgatgcatcatgttgatgatttccatatggtgcactgtccttgcatcctgggcatgaattccacttgatcatgacaaatgaatttttaatgcattcttgaattccgtttgctggtattttgttgaggatttttgcatcaatattcatcagagatattggcctgcagtttctttttttttcttttttctttgttttgttgtttgtttgtttgtttgttttgatgtgtctatgtctggttttggtatctgggtagtagtgttccatccccttttattttttagaataatttgaataagactggtgttggttctttaaatatttggtagaattccgaagtgaagtcattgggccccgggcttttctttagtggaaggctgtttattatggcttcaatctcgttacttattattggtctattcatgttttgaatttgttccttatttaatcttggtaggctgtgtgtatctaggaatttgtccatttcttttagattttcaaatttattggcacataattgcccattgtagcctctaatcgtcatttgagttcctgcagtaccaattataatgtctccttcttcatttttgattgtatttatttggatcctgcccctttttttcttacttaggctgcctaataatttcttaattttgttgaactttttcttttgtttgtctcgctctgccaccaggctggagtgtagtggtgtgatcttggctcactggaacctccgtctcccaggttcaagcaattctcctgcctcaccctcccaaatagctgggactacaggcaagtgccaccactcccagctaatttttgtatttttagtagacacgggttttcaccatgttggccaggatggtctcgatctcttgacttcataatccacctgcctcagcctcccaaagtgctgggattacaggcatgagccactgcgcccagcctaattttgtttaaattttcaagaaatcaacttcttctttcattgatttctgtattttttatttccattttatttatttaaactctaagctttattctatcttcttctcattttagctttggtatgcttattgcctctctagctctttaatgtgcattgttagattgtttatttgaagttcttcctctctacaccataagacgtaagcatgtcctcattatgtcataagatgtaaccacttacagctataaacttccttcttagttctgcttttgctgtatctcataggctttgttatgttgtgtttccattatcaattgtgtcagaaatttttcaatatttttcttaatttcttcattgagcaactgatcatttgggagcatatttttaaacttccatgtacttacatagtttccaaaatacctcttgtgatcaatttctagttttattccactatggttcaagaagatgcttgatattatttcaattttttttcacattttaagatgtgttttgtgacctaacatatggtctactttttttttttattaaactttaagttgtggggtacatgtgtagaccgtgcagttttgttacataggtatacacgtgccatggtggtttgctgctcccattaacctgtcatctacattaggtacttctcataatgctatccctcccctaacctccaccctctgacaggacctggtgtgtgatgttcccctccctgtgtccatgtgatctatttttgagaatgatccatgtggattagaatgctgtggaaaagactttggattcctaatatccagggagggagacgatgatattactttcaatatcacacgggtgtacacactctctgtgacattgttcctaatatccagtggaagagaggatgatataacacccagggagggagaggatgatattactcttaatattgcagggtgtgtacccatgcctatgatattgttcctaatatcaggagggggagaggatgatattactcagaatatggcagggggtgtacacacactctgtgacatggttcttaatatacaggggagaatgggacaatattactctcaatatcgcagggggcgtacaaccctgtgatttgttcctaatatacaaaaggggacagtatgatattgttcctaaaatcgcagaaggtgtacaacgccctgtgatattgttcctaatatccagggcgggagaggatgatattacccccaatatcacagggggtgtgcactttccctgttacattgttcctatgatccgagtggggggaaatgacattagtcccaatatcgcaggatgtgtacactactcccccatgatattgttcctaatatcaagggggagagaggaggatattactcccaatatcgcaagggaggtacatcctccatgcaatattgttcgtaatattcaggaggagagaggaagatattactctcaatatcgcagaaagtggacacccaccctgtgatgttcttcataatatccagggaagcagacgattatatgactttcaatatcgctgggagtgtacatcccttttgggatattgtttctaatatccaggaagggagaggattatattacttccagtattgcagccagtgtacacatttcttgtgatattgttcctaatatccagaaagggaaaggatgatattactcccaatattgcaggtggtgtacacccccctctgatattgttccttacatcaaggaaaagaaagaagaatattactcccaatatcgaagagagtgtacacccctcctgtgatattgtatttaatatccatggggaaagaggatgttgttactcccaatatcgcagggggtttacacccacactgtgatattgttcctaaaatccagtgaaggagaaaataatattgctcccaatattgcagggtgtatacaggccctcccccgttatattgctcctaatatccagcggtggagaggatattactttcaatttttgcagggagtgtgtaccccctctctgatatttttctaatatcaaggatgggaaaggatgccattactcccaatatcgcaggaggtgtacatgccctgtgatattgttcctaatatccagggaggtagaggatgatattactttcaatattgcaggggctgtacaccctctatgatgttgttattaatatttaggttgggagaaaatgatatttttcctaatatcctgggaaggaaaggatgatattactgtaaatattccagggagtgtacaccttcctaatattctaatattgttcctaatatccaggggtgggagaggattatattactcccaatatcgcagtgggtgtacacccctcctgtgatgttgtttctaatatccaagcgaggagaaaatgatatcactctcaataccgcagggggtgtacaccttccccatcatatcgttcctaatattcagagggaaagaagatgatgttactttcaatatcgcaggggttgtacacaacccctgtgatatttctcctaatatccaggaagaaagaggatgatattgctcccattatagcagacggtatacgcctccctgtaacattgtttctaatatcaagactgggagaggatgatatcacttccagtatcgcaaggggtgtacacctcccccgtgatattgttactaatatccagggggaagaggataatattactttcaatattgcaggggctgtacacccccgtgatattgttgttaatatttaggttgggagaaaatgatattagtccaaatatcgcagagagtgtacacacttccgataatattgttcttaatatccatgggggagacgatgatattacacccaatatcgcagggggtgtagtctccccttgtgatattgtccctaatattcagggaagtaaacgatgatgttagtgtgaatattccagggagtgtacaccccctttgtgatattgtcctaatatccgcaggagagaagataatattactcccaatatcgcagggggtgaacacaccccctgtgatattgtttctaatatccaagcgaggagaaaataatattactcccaatgtctcaggggatatacaccttccctatgatattgtttctaatattcaggtggaaaacgggtgatattactcctaatatccaggaagaaaggggattatgttactccccttatagcagggggtatacacctcccctgtaatattgttcctaatatcaaggctgggatatacgtggggggaaggatgatattactcccaatatcacaggggttataaaaccttctgtgatattgctcctaataaccatggcggaagaagatgatattactcctaatattgcaggaggtgtacactcccccattatgttgttcctagtatgcagaaaaggagaggatgacattattgccaatatcgcagggtgtgtacaccacccatgatattgttcctaatatttagagggacagaggatgatattactcccaatatcgcagggggtgtacacgcatcccctgtgatattgttcttgaaatcgaggggaaagagaattatatttctctaaatattgcagagggtgtacaccgccccctgtgatattgttcctaatagccgggggcggggggagataattaaattactttcaatatctcagagagtgtacatcccccttgtgacattgttcctaatatccagagcaaaagagaatgatattcctcccagtatcgcaggaagtgtacatttaacctgtaatattgtttctaatatccagggggaagagaatagtaatactcccaatatcgtaggggttgtacaccttttctgtgatattgttgcaaatatttagaagagagagagaatattactcgcaatatcacagggaatgtatacttcccctgtgatattgttctaatatctagaaaaagagaggataatattactcctaatattgcagggggtgtacacccccacttgtgatattgttcctaatataaaggaaggtcgaaaaacaaacggggagcccagggggaaggaaggcaggcgaggaagaggcagcgccggggcgccggagggagcagccgggccgcggaagcgcgagcacgagaccggtcgcggtcgcagtcgcatttttgccgttgtcgcggccgccgccgccgaggcttacccggggatgtctgagcccgcgcctcgcggcccccaagctccacgctgcgcccgctgtcccggcctctaagggccgccacgtccctgcggcgcgcgcaggcagaaagcggcttcgtgccggcggagggggcccgggcgggccgggaaaggctgccccaggccccgcgcctaccccatcaccgcggccggcgccgggccgggaggatgagcggtgtggggctctgaagcatggagggggttttgtacaagtggaccaactatctcacaggttggcagcctcgttggtttgttttagataatggaatcttatcctattatgattcacaagatgatgtttgcaaagggagcaaaggaagcataaagatggcagtttgtgaaattaaaggtgacagctttggaggggaccacccttgattggatacataaattctgttcattcagcagacaacacaagaatggaattaatcattcctggagagcagcatttctacatgaaggcagtgaacgcagctgaaagacagaggtggctggtcgctctggggagctccaaagcatgtttgactgatacaaggactaaaaacgaaaaagaaagaagtgaaaccagtgaatcgctgaaaaccaaaatgtctgaacttcgcctctactgtgacctcttaatgcagcaagttcatacgatacaggaatttgttcaccacgatgagaatcattcatctcctagtgcagagaacatcaatgaagcctcttctctgcttagtgccacgtgtaacacgttcatcacaacgcttgaggaatgtgtgaagatagccaatgccaggtttaaacctgagatgtttcaacggcaccatccggatcccttagtttctcctgtgtcaccttctcctgttcaaatgaggaagcgttctgtcagccaccctggttcttgcaccagggaggagtagccactgtataaaagaaccagtatctgcacttcaccgactctcccagcgacgccgaagaacctactcagatacagattcttgtagtgatattcctcttgaagacccagatagacctgttcactgttcaaaaaatacacttaatggagatttggcatcagcaaccattcctgaagaaagcagacttatggccaaaaaacaatctgaatcagaagatactcttccatccttctcttcctgaagaaactgtagtgtccaactttctctaagtattgctatgcaaaagctgctgtaattgaactattgttatagggagtagttttttcccttaggactctgcactttatagaatattgtaaaacagacaaacaagaaaacaaaccacatacttttgaagcgtgttttatctttatatagtttgtttgcaagagtattttcctaataacttcacagtatgaatgtgcatcttttttttctttttttaacaaatgatggtgtaacattttgacatccataaggacaaatgtagatatttttctaaaaaaccgtgaggggactgacagcttggtcagggtgtattgtagcttataaacatgaaatcttacaaggtttcagtttgacagaagtgtgatatatgtaacttgtgccatggaccaaatggtcactttaccacagctaaaaatgagttatgatagcagcttgatggtgattgcattgtattcctttaatcaaaaaggaaacgcaatattctaagtatctttagcccaaataccatgacatattgagcatctttaaataaccagactgtattgtccttcatatgtgaagttgacactactgatttgtcaataccaaattttgggttaaagtgtttaatttttatttatttattttcttgttgcctcaaaagatgattgcattctaacttttgtgacctaccaaatttaagatgtgtatacattgttctttacgttgttctagaaaagagattttaatgctgtagtgacttagctcacttacatcagagaaataaacaactttcaatggaaaaaaatatatataaaggaaggaagaggatgatattacttctcatatagaaggggttgtacaccccccttgtgatattgttcctaatattcagggagggagaggattatattactcccaatatagcagggagtgtacacccccccccccgtgataatgttcctaatattcagggaagcagaggatgatattactttcaatatcacagggggtgtgctgtccccctgttatattgttcttaatattcaggggggagaggatattattatgcccgatatcacaggagaagtacaccccacaagtgatattgttcctaatatccaggggtaaagaggatgatatcgcaggtggtgtacacccctccccgtgatattgtttctaatataaagaaggagagagcatgatattactcccaatatcgctggaggtctacaccccccttgtgatactgttcctaatatccaggaagggaaacaatgatattgctgtgaatattccagggggtgtacacccctttgtaatattgttcctcatatccagggggtagagaggatgatattactcccaatatcgcagggggtgcacggccccactgtgatattgtttttcatatccaggaggggagaggatgacattactctcaatatggcagggggcgaacaccccctgtgatattgtgctagttaggttgggagaaaatgatattactcccaatatcgcagggggtgtacaccgctcctgtgatattgttcctaatatccatgacgggagaggatattactcccaatatcgcagggggtgtacctctcccctgtgggattgttcacagtatccaaaagggaagaggatgatgttactcccaatatcacagggagtgtacaccaccattgtgatattgttcctaatagccagggaagaaaacgatgatattattgtgaatattacagggggtgtacacaccccctgtgatatggtttttaatatacaggttggaaaaggatgatattactcccaatatcacaaaaggtgtacacacccccccatgatattgttcttaatacttcggtggggagaaaatgatattagtctccatatcacaggggtgtgaactcctccggtgatattgtttttaatatcaagaggggaggagatgatattgctttcaatatcgctgggggtgtacatccctcctgtgatattgttccttatatccaggcgaggggaaaataatattactcccaatagtacacaccccatgtggtattgttcctaatactcagggggaaagaagataatattactttcaatatcacagggtttgtacacctttcctgtggtatagttttcaatatccagggggaaggtacatgatattactcccattgcagcaaggggtgtacacacctcctgtgatattgttcctaatatccagaagtggtgaggatgatattactcccagggggtgtacaccccacctatgatattgtttctaatatccaggggaaaagagtgtgatattatgcccaatatcgcagagggtgtacacttatcctgggatattgtttctagtatttggggagggaggagaggatgctattattctcaatatcgcagaaattgtacacccccgctgtgatattcttcataataatcagggaaaaagaggatgatattactaccaatattgcagggggttacacttcccctttggtagtgttcctaatatccaggaagaaagaggatgatattaatcccattttccaggaagtgtacacccaccgtgtcatgttgttcctaatatccagcagggaagaggatgatattactcccaatatcggagagggtgtacacttcccctgttatattgtttctaatacccagggggaagaaggatgacattactgccaatatcacagggtgtgtaccccaccctgctattgttcctaatattcaaaaggaaagatgaaaatattactcccaatatctcagggtgtgtacacctctcctgtgatatcgttcctaatatccacaggaagagagaatattactctcaatattgcaggggggtgtacacccccctgtgatattgttccaaatattcgggcggggagaggatgatattagtcccaatatcgcagggggtgtgcaccaacctgtgatattgttcctaatatccatgcgggggaggacgatatcactctcaatgtcgcaggaagtgtacacctctcttgttatatttttcttaatatccaggagggaaaagatgatattactgccaatatcgcagggtgtgtccaccccccttttatattgttcctaatatccaatggaaaagaggatgacattgctctccatatcccagaaggtgtacaacgcccctgtaatattgttcctaatattttgggggaagagaggatgatataacttataatatcacaggaggtgtacaccacccctatgtattgttcctaatatcctttaagggagaggatgatattactcccaatatctcaggtggtgcctattccccctgtgatattgtttttaatatccaggggaagagagtatgatattacgcccaatatcgcagggggcatacaccctctctgagatattgttcataatatatagagggagagaggatgatattacttccaatatcagaggtggggtacaccccccggttatattattcttgatatccaggaggggagaggttgatattactggatatatagcagggagtgttcacatcttctgtgatactgttcctaatatccagaaaagtagaggatgatattactcccaatatcgcagaacgtgtacacctccctgtgatattgatcctaacattcaaaggggagaggatgatattactcaaaacatcacagggcatgtacactcccctgtgatattgttcctagtatccagaagggagcaagataatattactttcaatatcgcagggggtgtacacccctctttggtatgtttcctaatatccagaaggaaagagggtgctattactttccatattgcaaggggtgtacacccccctgtggtatggttcataatatccagggagggaaagggtgctattattccccatatcgcgaggcatgtacaccctgctgcggtacggttcctaatatccagggggaaagaggatgctattacttcccatatcgcggggtgtgtacacccccgtgtggtatgttttgtaatctccgggaacgaagagggtgttattacccctcatatcgctggaaatgtacactcccctgtggtacggttcacaatatccaggggattgagggtgctattactccccatatcgcggggggagtgcacctccctgtggtatggttcgaaatatccagggtaagagagggtgctattattccccattttgcaggaggcgtacacccctctatggtatgttttgtaatatcccaggtaaggggtgctattgagagaagagagcaaaagaccccccccatattgttctgtattattttatactcagtacctgttttaagaagaaacaaggaagcgaaaccaaaggcaggcagcccggcgccaggcaccagatccaaaaccagacccgaaaccaggcctgggccttcctgaccttagcctgaaagttaaaattcaacccatgacctagcaactgatgttatccatagattccagacattgtatggaaggacattgtgaaatttcttgttctgttctgtttcactctgagtactggtgcatgcagcccttgtcacatacccactagattgctcaatcaatcatggccctttcatgtaaaaaccttagtgttgtgagcccttaaaaaggacagaaattgtgcactcaacaagcttggattttgatactctagtctgctgatgcttccagctgattaaaagccacttccttcactacctcggtgtctgtgggattttgtccgcggctcctcctgctacactgtgactccccttatagagaggggtgtacacccccctttggttcctaatatccagcgggggagtaggtgctattactccccatattgcggggagtgtacacccccttgtagtacggatcgtaaaatcaaggagggagagaaggtgtaattatccccatatcacagggagtgtacacccctttgtggtatagtttgtaatatccacgacgggagagaatgctattactccccatatcgtggagggtgtacaccgccctgtagtatggttcgtaatatccggaaggggagaggttgctattactccccatatggtgggaagtgtacacccccatgtgatatggttcataatatccaggggggtagaggatgatattacccacaatatcatagaaggtgcacacccttttgtgatattgtccataaaatccagaaggggagaggatgatattacttccaatatcacagggggtgtgtagccccatatgatattgtttgtaatatcaaggtagggagaggatgctattccttacaatagctcaaggggtgtaaccttcttgtgatattgtttgtaatatccagaaggggagaagataatttttttattttaaaagtaaactttaatgtcaaaaatgcaaacttgagaagggcagaaagatcaaacagaaggctgccacttcacaattggagggttgcacagtggccgggcagaggcgctcctcactccccagacggtgaggcagccgggcagaggtgctcctcacttccgagatgttgcaggagccgggcagaggtgctcctcacttcccagaacagggggctgccgggcagaggtgctcctcactgcccagacggtttgcaggcctggcagaggcactcctcacttcccaaacggagcagcggcaagccagaggcgctccacacttcccagatggtggggcagccgggcagaggcgatcctcacttctcagagggtagggcggcccagcagaggcgctcctcacttcccacatggtggggcggcaggctagaggcgatcctcacttcccagacggtggtgtggccatgcagaggtgctcctcacttcccagatggtgtggccgccgagctgaggcactcctcacttccctgacagtggggcggctgggcagaggcgctcctcacttcccagacacttggactccgggcagagactctcctcatttcccagatggtggggctgccgggcagaggcgctcctcacttcccagacggttcagaggccgggcagaggcgctctggggagaggataatgttactcccaatatcgcagggggtgcacactccctgtgatattgttccgaatatccagagggggaaaggatgatatagctcccaaaatcgtggggagtgtacacccccctgtgatcttgtttgtaataccaagaagaaaagagaatgctattatttccaatatagcagggggagtacaaccccctgtgatattgttcgtaatatctagggggagagaaaattatattagtcttaatatctcaggggacgttcatccccctgtaatattgttggtaatattcagaatggagaagatgatattgttcttaaaatacaggaaaaaatatgataatattacttccaatatcgaagggggtgtacactctcctgtgatattgttcccaatatccagaatgaaagaggatgctattactcccaatatcccagggagtgtacacccctttgccatattgttcataatatccaggggaagacaggataacattactcccaatatcaccgggggtgtccacccactagtgatatttattgttcatcatatccagaaaaggagaggatgatattactcccaatattgcaggtggtgtacggtccctgtgatattctttgaaatatctagaaaaggagaggatgatatcactccgagtatcacagggggtgtacacccccctgtgatattgttcgtaatatccaggggagaaaaggatgatataattgccaatatttcaggggatgtgcacctccctgtgatattgtttgtaatatccaggggtggagaggatgatattactcaaaataacgtaaacatcctgtgtgtacatcccctgtgatattgtttataatatccaggggggtagaagatgacattacccccaatatcacagagtgtacacacccctgggatactgttcataatatccaggcgggaaagaatgaactacttccaatatcgcaggatatgtacacccccctgtgatatatttcctaatatttatgtgggtaaggatattacccccaatatcacagaaggtgtacatcctctttgtgatattattcctaacatccaggaaaggagagaatgatattactcccagtatcgcagggggtgtacaccacccctgtgatattgttgctaatatccagggggagaggataatattactcccaaaatcacaggggacgtacactcctcctgagatattgttcctaatattcatggggaaaagaatgctactactccaaatacagcagagggtgtacaccatccccgtgatattgttttttatatccaaagggtgaaaggctgatattactcccaatatcgcagggggtgtacaggccccccatgatatcattcttaatatccagggaggcaaagaatgatgttactcccaatattgcaggctgtatacaccccccgtgatattgttcctaatatccagagtaagagaggatgacattgctcccaatattgcaggggttgcacgcacgccctgtgataatattactcccaatatcaacagtgggtgtacactcctcctgtgatattgtttgttatatctaagaaagaagaggatgatattactgtcaatatcacagaaggtgtacagccccttgtgatgttgtttctaatatccagcggtgagaggatggtattactcgcaatattgtagggggtgtccaacggccctgtgatattgtttctcatattcaaaaaggaaaagaataatataactccaaatatcgcagggtgtgtacacttccctgtgatattgatcctaatatccaggaagagagaggatgatattaatcccaatatcacagggggtgtacatcgcttctgtgatattcttcctaatatccagggggggaggggatgctattactcttaaaatcgcagggaacttacactcccactatgatatttttcctaatatccaggaagggagaaaatgatattactcctaatatcacatatcacaatgggtgtacatctccccgtgatattgtttctaatatcaaggatgggagaaaattatattactctcaatatcgcagggggtgtgcacacctcctgtgatattgttcctagtatccagcggaggagatgatattactttaaatattgtagaaggtgtacaacccccctttgatattgttcctaatatccagggggaaaggagatgatattactcctaatatcgcaggggctgtacaaccctatgtgatattgtttcttctaatatccaggggtggagaagataatattactcctaaaatcgaaggggacatacactccccctgtgatatttttcctaatatccagaaggaaagaggatgatattactcctaatattacaagaaatgtatacctgtcctgtgatattgttcctaatatccagaggggtaaatgattatattactcccaatatcgcaggggtgtacaccttccctgagatattgtttctaatatgcagtggaggagaggatggtattactcccaacatcacaggagatgtaaactccccttgtgatattcttcctaatgttcaggacgaaggagggtaatattactcactgtattgcagcagggggtgtagagccccctgtgatattgtttttaatattcaaggttggagaaaataatattccttccaatatcgcatggggtgtacacccttctttttatatagtttctaatatctggggggagaggatgatattactcccaatatcgcagggggattacacccccactgtgatattgtttttaatatccagggtgggagaggataatattactccaaatatcccagggctatacaccctccgtgtgatattgtttctaatatccagaggaagagaagatgatattactcccaatgtcacagggtgtgtacaggccttctttgatattgttcttaatatccatgagggagaggatgatattactcccaatatcgcaaagactgtacaccctttctgtgatattgcttccaatatccagggagggagaggatattacactcaggatcacagggggtgtacaccccaacctgtgatattgtttctaatatctagggaaaatgagggtgatattactatcaatatcacaggaggtgtacactcccttatgatattgttcctaatatccaggagaatgacaggataatattactcccaatatcgcgggtggtgtctccccccactccgtgatattgttcctaatacccagagggggagagaatcatattactcccaatatcgcaggggatgtacacctacatccggcggagtagaagataatattactcacaatatcgcaagaagtgttcaccttccctgttatattgttgctaatatccagggagtgagaagatgatattactttcaatactgagcgtgtacactacccctgtgatattgtttctcatatccagtagaggagaaaatcatgttactcccaatattgcaggggtgaacacctcctttgtgatatttttcctaatatcaggaaagggagagtatgatattacccttaatattgacaggggtgtacacccccctttgatattgttccaatatccaggggggcagaggataatattattcccaatatcgcagagggtgtacaccccccgtgatattgttcctaatatccagagaaataaaaaatagtattatttccaatatcacagggcgtacattttccctgtaattttgttcctaatatctggggggtggggtggcaggataatattactctcaatattggagagggtgtacacccccctgtgatattgttcctaatattcagggtgggagagaatgatgttactcccaatatctcaggagtcgtatacacccccttgtgatattttttctaatatccaggaggcagaggatgatattgctcccaatatcgcagggggtatacacccgagctgtgatattgtttctaatatgcaatatgggggaaggatgattttactttcaatatcgcagggaatgtacactttccttgtgattttgttcctaatatccaggggtggagaagatgctattactatattactcctcatatcgcaggcggtgtacaactccctgtgatatggttcagaatatccagagtgaaaaaggagggtgacattactcccaatatcgggggggtgtacacccctttgtgatgtggttggtaatatccaggggggcagatgagggtgatatcactccccatatcgtggaaggcgtccacttttttgtgatgtggttctttatatcccgaggggagaaggtgatattactccccatatcgcgaagggcatacacccccctgtgatatagctcataatattccggagagtggaggaagatactatgccctatatcgcgggtggcctacaaccccctatggtttggcttataatatccaggggggagagggtaatattgctccccatattgtggagacgtacagccccctgtgatatggtttgtaatatctttggggggcgagggtgatattactccccatatcgcggggagcatacacccccgtgatctggttcatagtatctcaaaggaagaagttgatgtgtacaacttaagggaaaaagttgaagtgaagtgtacacacgccctgtgacgtggttcataatatccaggcgggggagaggagagtgatatttactccccatatcgcgggtgttgtaaactcccctgtgatatagttcataatatccaggggagagaggagggtgatattgctcctcatatcgcgaagggtgtacaaccccctgtgatatggttcataatatccagaagggtagaggacgatgatattactccacatatcttgggaggtgtgatatggttcgtaatatccagcgatgagagaatgatattactccccatatcgcaaaaggtgtgatagggtttgtaatatcctgagggggagagggtgatattaatccctatattgcagaaggactacaccctcccatgacatggtttgtaatatcccagggggtagagtgtgatattactttccatatcacagggggtgtgatatgattcgtaatattcgaagggggagagggtgacactactctccatatcacggggtgtgtgatatggttcttaatatcccaggggttagaggttgatattaccccctttttggggggtgtgtacaccccctgtgatatggttcgtaatatcccgggggagacagggtgacattattccccatatcgaggggatcgtacaccccctgtggtgtggttcataatatccctagggggagatggtgatattactccccatatcagggggcgtgcactcttctgtggtataattagtaatatccagggggcagaggtcgatattcgtttccatatcatgaagggagtacacttccctgtgatatggttcctaatatccaggggggagagggtgatattattccccatattgcggggggacatacaacccctgtgatatggttcataataaccagaaaagaagagggtgatattaatccccgtattgcagagggcatacaccccccctgtgatatggtttgtaatatctaggggaggaaaaggtgatattactttccatattgctgggtgcagacacccctttatgatatggttcataatatccaagttggagagggtgatattacttcccatatcatgggaggtatacccttccctgtgatatggttcgtaatatccagaaggggagagattgatattactccccatattgtggggggcgtacaccttcctgtgatacggtttgtaatatctaggggatatagtgggtgatattactcaccatatcacgggggttgtaacatggtttgtaatatccaggggaggagagggtaatgttactccccatatctcggggcatgtacaccctcctgtgacatggttcgtaatatccaggtcgggagagggtgatattactcctcatattgccgggggtgtgttatggttcataatatcctggggaaggaggctgctatcactctccacatcttgggggatgtacactctcctgtgatatggttcataatatccagggtgggtgagggtaatattactccccatatcgcgggaagtgtacatacccctgtaatattgtttgtaatagaagagagggtgatattactccccacatcgcgggtggtgcccacccccctgtgatatggtttggaatatccagggggatgaggagggtgatattactccccatatctcggtgggagtacatccctctttgatcaagttcataatatccaaaaggaaacaggagagtgatattactccccatatcgccgggggtgtacacgggagggggagtacacccccggcgatatggtctgtaatatccagggaaggagaggagggtgatattactcaccatatcgcaggtggtctacatttacctgtgaaacagtttgtaatatccagggggggaaatgagaatgattttttttttttgagtctcactgtgtcacccaggttggagtgcagtggcacgatcttggctcactgcaacccccgcctcctggactcaagcaattctcctctcccagcctcctgaatagctgggactacaggcgcaccccacaacgtctggctaatttttgtatttttattagagacggggtttcaccatattggccaggctgatctcgaactcctgaccctgtgatccatccgcctcggcctccaaaagtgctgagattacagatgtgagccaccacgcatggcccaaggagaacgatattactccccatatcccagggggtgtatatccccctgtgatatggttcagaatatccggaaggaaagacagggatattacttcccatatcgcaaggggtgtgacatggttcgtaatatcccatgggggagagggtaatattactcttcgtattgtgaagggcatacactcccctgtgatacagttcataatattccggggagtagaggaagatattatgctccatatcgcgggtggcataagccccctgtggtttggttcataatatccagggaggagagggtaatattactccccatattgtggggacgtacaccctcctgtgatatggtttgtaatatcccagaggggagagagtgatattactccccatattgcagggacatacacccccctgtgatatggttcaaaatgtcttttttttttgaaggactggttctttatttcaaaaagacacttgtcaatattcattatcaaaacagttgcactattgatttctctttctcccaatcggccccaagtagaccacatcaaaggagagtacatattaagccaataagctgtaggatgtacacctaacagacctcctagaaaccttaccagaaaatggggacagggtagggaaagaaactttaaaagatcaacaaactgccagcccacggactgcaggggctgtcacagccagatggggtggccagggtgccacaaacccaaagaagcaaagtttcaaaataatataaaatttaaaaagttttgtacataagctattcaagatttctccagcactgactgatacaaagcacaatgagatggcacttgtagagacagcagcttcaaactcagaaaagggtaatgagatgagtttcacatggctaaatcagtggcaaaaacacaatcttctttctttctttctttctttcaaggaggcaagaaaagcaattaagtgctcacctcaacataaggggaacatgatccattctgtaagcagttgggagggggtagagatggaacaaaattttggtctcagaggtcttgccatcttaatttggtcacttctaatgaaaaaaataaaaaatagaaataacattatccaaaggtatcttaaagctgaaaacttgaacagcacattttttgttgttgttgtttggctaactcctcctggaaccacctttctggcttagctagtactttgtacagagcaatgaggcttcccatagtggagtctccctgggctctgtttggctctcagcaaggcaggcctataccttttcctctcctccatggagagaggaatatgcattaaggtgaaaaatcaccttccaaaagtgagaaagggattcgatcgctgcttcagggctgtggtattatatggaatgttttacaaaaggttgctacaaaacaacaaaagaggtaattacaaaatgtgtacatcacaacatactttttaaagacattatgcattgtgctcacattcccttaaatgttgtttccaaaggtgctcagcctctagcccagctggaatctccgggaagaggcggacagtttggtgaaaaagacacagggaaggagcgggcggcggaaggagggggcggcgaaaggagaaagcagccttccagttaaagatcagccctcaattaaaggtcagcttcgggcaggctggcctcaggcggagtctggttcagagggaggagcagcagcagggtgagactgaggcgttctacatctcattcaggtcaagcagagtctggtccagcatcctttgtgtacagaggtgctcccctttggtgcatttcagtttatcttccaagtcatcaattgtcttttccagcttggctaccgatctctcagcaaactcagcatgggtctccgcctcctttattttatcagtaagaatcttgatctcttcctcatatttgtcttctttttgagagtacttttcttcagcagcactcagacacttcaggttctggtccatcagtctaatctgctcatccatctctcggcaaagggattctgccagctcagctcgttcctctgtgcgttccaagtctccttcaatgatcaccaacttacgagccacctcttcatacttcctatctgcctcttctgcaatgtgcttagcttctctgagttggatttcctggagttccatcttttcttcatcttttaaggcccggttttcaataaccttcttacctctctcactctcatcagcagctttttccgcttcttccagcttttgcagggcagtagccaggtgctcctgagcacggtccagctcctcttcaaccagctggatcccacgttcaaggaggccacctcagcctcagcctgttcccgggcccacctttctccctcaacttctcgctggaggcgctcagctcgctcctctgcatcatctgcctgctgctgcagaacctggatcttgcgcttcaccgcctcgatggtggtgatcccagccatggtgcccacccagctactgctagagctccggttcctgcctcctccgatcggcgttgcagcctcctctcacccttacttccgcctcggttcaaaatatcttaagggaaggagttgatattactccccacatcacgggaagtttacatcccctggtgatatggtttgtaatatcccagggtggatagggtgatattactctccatatcgcgaaggagtactcccccctgtgatatggttcataatatccttggggggagagtgtgatattactccccatatcgcgagggccatatactcctttgtgacatggttcgaaatatcccggtgggggagggggtagagggtaatattactccccatacagcgaagagcatacgcccttctgtggcaaggttagtaatacttcagggaaaagagtgcaatattacttttcatattgcagggaacatacactcccctgtgacatggttcgtaatatcccgggggctgagagggtgatatttctccccatatcaccgggggcctacacctgggtgtgatatggctcataatatacagggagggagagggtgatattactccacataccgagtgaggggttacacaccctcgtgacatgttcgaaataccccaaggaggagacaatgatattactttccctgtcgcgggggctacaccctcccagtgatatggttcacaatatcccggggtggagagggtgatattactccctatatcaccggggggtgtacacttccctgggaaatggtttacagtatccccggggggagagggtactattactccccatatcacgttacatatcagggtacacccccacgtgatatggtttgtaacatcccaggaggaagaaaatgatattactccccatatcgcggtggcatacacccctccccgttaaatggttcataatatcttggggtggagagggtgatattactccccatatcacgtggggcatacaccccactatgatatggttcataatatcccggaggggagagggagatattactctccatgtcgcggggggcatatacacccctgtgatatggtttgtgatatcccgggggcggagagggagatattactctccatatcgtggggtcgtacacttttctgtgatatgattcgtaatatccagacggggagagggtgatattacttcccatattgcgggggcgtacacccctctgtgatatggttcataatatcccgaagaaaagagggtgatattactcctcatatcgcggggaacacacaccaccctgtgatatggtttgtaatattcagcgggggagagagtaatattactccctgtatctcggatggcgtacactcccctgtgatatggttcataatatccagaagaaaagagggtgatattactccccatattccagggaatgtacaccaccctttgaatatggttcgtaatatccaggaggggagagggtaatattgctcccaatatcgaaggaggtgttatacggttagtaatatccagagaaggagagggtgacattactccccacatcgtggtgggtgtgcacccacctgtgatatggttcataatattcaggttaagagaggtgatattgctttccatatcgccaagggtgtacactcccgtgaaatacagttcgtaatatccaaaaggggagagggtgatattactcccatatcgtggggggtgtacacccctctgtgatatggttcataatatccagggtggaataaggtggtattactccctgtatctcggggcatgtacatcgcctgtgatatgattcataatatccagaagaagagagggtgatattaatctccatattgctgggggtgtacaaccccctgttgtatggtttgttacactgagttggggagagggttacattactctcaatatcgagtggggcatacacacttatgtgatatggttcataatatcccagggaggagagggtgatattactccccatatcgcgggaggcatacaccccaatgtgatatggtttgtaatatctacatttttttttttgagacgaagtctcgctcttgtcccccaggctggagtatgatggccggatctcggctcactgcaacctcagcctcccgggttcaagcgattctcctgccttggtcccccaagaagttgggattacaggcgcacaccaccacgcccggctactttttgtatttttagtagagaaggggtttcaccatgttggccaggctggtctagaactcctgacctcagatgatccacctgcctcggcctcccaaagtgctgggattacaggcgtgagccactgcacctggcctggtttgtaatatctatgaagggggaaggtgatattactttccatatcacgggaggcgtacaccacgatgtgatatggtttgtaatatccagggggtatactgggtgatattactccccatatcgcggggagtgtatacccttttgtgatatggttcctaatattaagctgaggagaaggtaatattactccccatatcgcaggggtttttatatggttcataatattcaggaagagagagggtgacattactctccatatcacggggtgtgtactcccccatgtgatatggtttgtaatatccagggaaggagaggttaatattactccccatatcgcagggggtgtacacctctctgtggtttgtaatatccaaagggaagaggatgatattatcttcaatatcttggggggatacagtccccagtgatattgttcataatatccagagggggaggggatgatattactcccaatattgcaggtggtgtacaaccccctgtgatattctttataatatagagggggatgatgatattactcccaatatagtaaacaacctgtgtgtacaccccctgtgatattgtttataatatccaagggtggaaaggatgatattactcctcatatcgcagggggtgtatacccctctgtgacattgttcctaatattcaggggaggagaagatgatactactcctcatatcacaggggatgtacacccccctgtgatacttttggtaatatccaggggaggagaaaattatattattccccatgtcacagagggtgtacaccccgctgtgatagtgttcataatatccaggtgaaaagaggatgatattactccgaatatctcaggaagtgtacacccttctgtgatattgttcataatatccaaaggtggagaggaggatactactccccatatcgcagtgggtgtacacccccctgtgatatggttcataatatccaatgtaggagaggatgatattactttccatatcgcggagagtgtacatccccctgttatattgtttgtaatattcagggagaaagaggatactactactccccatatcacacggggtgtatattcccctgtgatatggttcctgatatccaagagatattataatcctctcttggattatgctacctctcatatcgcatggggtgtacacacactttgtgatatcgtttgtcatatccaaggagggagaggattatattaatcccaagatcacggggggtgtacaccctcctgtgatattgtttgtaatattaaggggggagaggataatattactcccaatataattaacaccctgtgtgtactcctccttgtaatattgttcataatatccaatgggggagacgatgatattactttcaatatcgcagaggatgtacatccctttgtaacaatgtttgtaatataaaaggcaagagaggatgatactacttccaaaattgcaggacatgtacaccccccggtgatattgttcctaatatccagtggggaagaggatgatagtagtcccaatatcgcaaagggtgtacacaccccctgggatattgttcctaatataaaaggaggagaggatgctattattcccaatatcacagaaggtgtaaaatcccctgtgatattgttcgtaatattcaggaggggagaggattatattactcccaatatcacagggtgtgtacacagggaggggcaagggccagaagcgggcgggaatccccatgtttgggcggacccagtttctaatggccagcatttgccaatcaaagcttaccagagaactctaaaagccagggctttcctgctagacaagactcatttctggaactgctttaaaaagaaacaaaacttcccaaggaccccttttcctctctgtctgcctaaaataatgttttaaaaactcctaaagcagctgaattcagcccccttcctgggggaatgtatagacggaactcccacctttcccggcatcccaaggccagagtatgtgaaactcctgggtctctatgtgtgtctgagcggctgctctgccaacactccacacagccctgtgtcctggacccaaggcccttatgacctgagctcaagaggggatctcctgatccatgggttgcaaagatccatgggagaagcatggtttctggggcggggtcacacgctcagtcactgtttccctcggatgccggagatggttcctttggctctctgccaatacagggtgaatcatcatccatccctcttttctttgttctcccgggtcaagttgtttgcctagtcagtcccaatgtgagaacctgaatatttcagttgacgcgctgacttcaaaatccccgggcttcgggaggcggagcttgcagtgagccgagatcccgccactgcactccagcctgggcgacagagcgagactccgtctcaaaaaaaaaaaaaaaaaaaaaaaaaaaaaagtccccgggcttttcttttcactcagtggaaggcagctgcttctaattggccatcttggcccgcccccaccacgtgaccttctgtaaaatgcctccactctccaggaacgctctcattatataactttgcctgaaaccaacagcacgctcattgcacatatcatgggctcatttatttcacttataaagaacctggccaaggaagagatagtgcctaaagtggccagtattctgaccgatatgttagaaaaatggtgtgccgaccaattcatgacatgtgtcccaaaactagcaacggaaattgtattcgccgtgttgaggtctctaatccagatgatgctcatctatgtactggaaaaggcagagtcctttcctgacaagctgctgaaactcttcagaaacatctcatatttcctgaagaagatgatgtctggacaagcagcacaggtcgttcagatttaactttctattcatatatccagcacgatattcgcacaattgtcacgaaaccttaccagttgatgagtcctgcacatttcctttaatttcaggaggaagagggtaatccggatgagttttctgacctactctgctgctgtgattaaacaaccaccaggaaattttgacgacactgttctcctgagctcctccctttcctccgggaacaaaacaattgaatttacaaaaataaagtgttatttgactggagtgaggtctcatgtctgcttatgcggtggctcgctgctcagaacagggtgagtctctgggttgtgtgctgaggaggggaggctctcaatctggagaaaacccactgcaggggacacctccatggggtctgagggactgaggatgaggagccggactgggtctagggaaggaggaggtttcagagggtgaaattctggcactaaagcctgggggtgtttgggaacttcctccttccgaagaagtttcagggagggataaagacaaaccctgggctccttgaggggcccttactaatttgagaggactctatcgggaaggagagtgacaatggcctccttgaggactgaggcccctgaataaatgaggcccagatacagtccatgggggatgagaccttcaagggtcacattttggttgggacagaggaaaagtgcagctctgcagccgcagaggaaaacccggcagtgtgaaagcgaccttggaggggccctgtgcgctctgaatgcgtctgagcccccatcccctgtccccgcctctctttctggattcttccagctcggctgtctccgccatcttctgagcgctccaccctgacttattcaagtttcccttctgccttccaagtactccaaaatctttcagatctgtgtccctacccctgtttttagcatgtgttggggctccaggtccctgaaggtttctggcctgaaatccacctccccagcggagtggactgcgttctagagactccacactccgcgaggttcccaggcccctgagggacaaccgagtggcctgcgcacttcagggctccacactcggcaaggtctttcaagcccttggggtccccttcttagttttttccacctttctgggctgcagtcactccataaatgctgggatctgatccccacccccactctcgtttcctcaattctgcgggctacacgctctggcaaggtcctccgggccctggatcccctccctctccctatgcccacgctcctagtcagcccttctggggtccactattttcaggaactaaccgttctcatggagccttgctaaccggaaagctgtgtggaagaaaggctttgaggatagaggtggagatttggctcttccatagtgccactcacccaccccaccatgctgccactgccagacccggacccctgtttcagaacaagtgaccagattcgctcctggacagccctggacactggccttttctctgaaaactactcaccctttctctagtccccacttcatgccagcctcataccctcttccttcccccacgctggcttccgggatcctcctctgctcagacaacctcttctgtgtcccacccccgtttttagaatgctttggggcaccaggttgggggaaggtttctggcctgatatccatctctttccaaactcccttcttcccttgaaaggcttcttgccttcagccccacttctggctccgaggtttcaggacaccctcctcttcatcctcattcttttgaccaccagctttttaggaattcgaacgtccctctcatcttcgtgaatcctgtccaggcatttgttgaccccttcatctgatacccctgacctcacattgccaaaagtctacccctacccagtacactggaattagacaaaatcccaggagttttacctcaactctgagtgtgcccacaggagctctccctgaagccacgtccttttaagcagggtctagggttcctcccttgtcttaatgaactctttgtcacacggaggacgttatggagcccttatgatctttcactgcctttctgcccagcgttttgtctttccatggacatttataatattttccatggacattttgttctctcaatgtccacccctaatttccaacatcccaaagattctcatgtgtttcctgaaagccatttacaggaatggctgtgcccagacccccttccccaggatcctccttcacacctggtaggtgcctctcctagagagatttgcactcagttgtcgtgcagtcacatggcccagatggttgttaatcacccccttcctggcaacagctagcagccagggaatcactggcacagaaacctcagggtgaccaagatgaggccacctctgtgctgaaggctgtgctccagagcctgcttgggatcaggcttaagcaggtcttcagccagacctgatgttacctggtttccttgagctgccctgcctgagctatcgggagcactccctcaatgcacatcttgattccctatctcatgctctgcttctagaaaccatgagctatcaattgctactggcaatggtcctgggaagtcaaccctaagtatggattctggggttggatgactccccacaggacttcagtgagcaacaatcactgctggcagttggaggacagagtcgctagggcatgtgaccactgtgaaaccaccgatgtttcacctggggtaattttggatgaactacggtagaagcactgaaggtacattgcttttggtttggaagattgtaggtaaataatagcgatatgaatgtggaattggatggctgcaaacgagtgccattgatgcattgaaagaggaaaagtcaggctgtcacctgtcactcagcaatttaaagtgtgagagttgggactagatgtggtggctcacatctataatccagagattcgggggaagcttgaagaggtaggatcttttgagtccaggagttccagaccagcctggacaccagagcaagacctcatctctacaacaaaattttcttaaaaattagatgggcttggtggcacgcacctgtacttgtagatctagctaatggggagcatgagataaaaaaatcacctgagtcagggacttaggggttacaatgaggtatgattgtgccagtgcacacactcccacctggccaacagagtgagattctgcttccaaaaaaataagaaataaatcaggtttgagagttggaaagcatcatcttctcctagagccaaaggacatgtacaactgagacccaggaacaaagcttcatcacaaagagaccatcatcagtggagccgggagatgcattccccctcaccctgccttgaggaggcagtggagtcatctgtctgggatcctttctgacccagccctatttgtttgtctctttggcttctttggatttgtatattttagctgttataacactgtaaaacaaacagagtgatttttttgagttgtgtgaatgatgctagctccatagtcaccctgagagtgatgggaacttttgaatttgtggcaagttggagggtagtgtaagtgacctgagattgccaaattggggctagcactggatgtgaggttaggctagtggaaaaatatgcccagaaccagaggagtgtgggctcactgcaggtggttaggctcagatccaaattgtacagatggatagctttggggtaaagaataacatagttgagaagtgcatgtgttagtctgttcatgcactgctataaagaattacctgagactgggtaattatttataaaactcaggtttaattgggtcatggttccacaggctgtacaaaaagtatgatgctggccatcagctcaacttctggggaggccccagaatagttagagtcatggcaaaaagtacaagggaagcaggctcatcttccacggccagagctggagcaagtggtaggagaggtgatacacactttcaaacaagtaggtcttttgagaactccatcaccggacagcacctatgggatggtgctaaattattcatgaaatatccgcctccataatccactcaactgtcaccagcgcagccagccccacctccaacagtggggattacaattccatatgaggtgtgggtggggacacagctccaacctcaatcagtgggcatcctggattgggtctactatagaaggagaaccaggagctgactatgatcttgaaccctacccatgatggccgggcggggtgactcatgcctgtaaccccagcactttgggaggctgaggtgggtggatcgcctgaagtcaggagttagagaccagcctggccaacatggtgaaaacctgtctctactaaaaatacaaaaaattagaccggcgttgtgctggatgcctgtaatcacaccactacgctccagcatgggaaaaaataccaaaacttcgtctcaaaaaaaaaaaaaaaaaaaaaaaaaaaaagactgcccatgaccactgcaccagtgagagggacaccagcatcactgagatgcaagggctggacattcttcataggtcagagctcaaagcaggggacactgatacagagatgggctccatccatagcaccaaagtggtgagaggatgtgggaatggcagaggccagcactttgccatcaatgcaagggggtataaggaggtgacaccagtgccagagtacatcacggggggactgccctacaatatctaggacttacctcttagagcgtgtttcattagcgacaacagatataaatggcagacaggtgtgtccctgcattaacaggaaatagaaatcatcaagaggaacagaaggcagatgtcagcagccccttagaaagtcatcatccttcatacagttaaaatctgagacagttctcacacgagaaggcctaactcaaaaagaggctgggttctcatgaggcaggtttatgcaaaaccaaggaaggtgtacaagtttggaattctccagtttcccttggaaaagacctacagtcatttgcttaggtaactgagcactgaacaaaggtgagtattgttgtcttttagaagctcttggccaagaaggccttgttggcataaaacccatggtttggaaacatcaccatgacccctgttagagtaatggcctaagggtgggggtcaggaaattgatgtattccttgccaacttctgcctctaagtgagtgaactctgtttgtgaacctctctcctctgtggttatgttcctaggctctcatgtataatcaggagtcatagacttagaaacaggaaaaatacttacagtgtttttgtggcctgtgagctatgacttataattttaggaaaaaaacaattgcaaatggaaagcctaagtctatcaatgctcatccaagacaacataatcaataaaaaccaatatcaaatctcaaggcaaattatttcctgtatatagatggcagagatgagcaccaccatcaaaaactcaaggaccagtgctgtgggtccagtcatctgtttcatggaattcaccagtctggtatcttcaaaatccagaaggatgatggcagatggcaggaaagtaatgcaaacgtcatcaggtgtgaccccactgtagcagctgtgatggatgttttctctcaccatagcaataaataacacaacctcggtcacactgtatgcattgttggtctgcaaaatccatgttttgcaaaactcttcaggaaggtggatctgtaatattggcattgacatgagaacaacagcagtatttattcacaatctcaagctctctgtcttcccgtctctctcattagccatccaagtagtcctgaggaaccaagcccatcagaacattctgcaacataatacacagctccattctccattcaaattttgttgttgttgttgttgttgatgagacaacatcttactccatcagccaggctgacgtacagtggggctatctgggctgactgtagtcttgagcttccaggctcaaggcatcctctcacctcagcctcctaagtggcttgaactacagacacacagcgacatgctgggctagtttttgtatattttgtagagacgtgctctcaccatgttattcaggctggactcaaactcctgagcgtaagtgatccaagcaccttggcctcaaagtgctgagattacaagcctgagccactgcacccagcccaatctccattctactgataacaatgtcattaccaggtctgatggacaggaaatggtaaggtttctgaaaacctaaggatcacacagcgagttccaaaggctgaaagtgcatacctgtcgacactgataccaatgacatccaatggtgagaatgacattccttgtagtcctagctctgctcataacaaatctatactgaagtgtaagagtttgatggtcatggggattttccatgtctctgcctttcagcgatgtgccatatctgtgaagtgttcagaaatgcaacagcctgaggcatgctgggcatatcctctaataaaaaggaaaatgccattttatggtcctgtatttctacaagttggaacacatgggcctgtgatccagatgggggaaatgggaatattcccactcattcaccttcatccacgaagcccatttgaaagctttgggcttcccatccttgtagattttagtgttgtgggctgggtgcagtggctttcacctgtactgccaacactttgggaggcctagacaggtgaatccactgaggccaaaagttcgagaccagcctggccaagatggtgaaaccccgtccctactaaaaatacaaaaattagcaaggtattggggccagcacctgtaatcccagctgctcgggaggctgaggctggagaatcgcttgaacccaaaaggcagagactgcagtgacccgatcctgcctttgcactccacctgggcaagcagaacaaaacttctgtcttgaaaaaaaaaacaaaaaacgaacaaaaaagatgttagagttctgggtttagaggtctataccccagaaagagaatggtttcaacaagggacaaagaagttgctttaaacgttgacttgccatttcttttcagtgtgtttgttctcttgcgtcaagagaccaccagaaaagtggtgcaattactctcctgtcaagaatcattgactatcatctgcaagagggtcagatcctggtatataattagggcagaaatacttagtctgagaagggtatgacatccagaggccctattaatgatgtccttttctccatgcctgactctgaccccatgtgctggactgcccctgtgtggatggcctcatggcctgctcggactctgaggtcccaccccaagtggcacctccatggagggctctactcttgtatgggctctgacactcacactgagacactctcccatggacacctcttcacccacttggggtctgaaactgggctactccatccctccctaacctggaacagagagctttcactgctattacacaagtcatagaggctaactcctcatttttccaagctaattattgaaacattagtcctgggttgataagacaagataagttaacttttcataaatttgcttatcaagttttgaataaattcaaataaattcaccttccccacacaccttagttgtcgacatcacacgcgcacccatactcacagggtgagcacgaaggcttcactgtcagtggagaaagtggcaaaacccttctgtgcctcatcctggtctagacctggccctcatcctttcccactcttcccctcactcccttggattcatccacactggcctcctgcctgctgctccacctccctgcgaagctcacccctgcctcagggcctttgcacgtgcagtggcttcaagccatatcctcttcacccagatctcccagatctcctgaatgatcttcttttatcattcaggtctcagcttgcatgtaatcttctcagtgaggattacccaaaccacatagttcattcattcattcaaatattcattcaatggcatattgacaaagcagctacttcatgccaggccttgggccaggtgttatggatatggcaacaaacaaaacaagagttttctgctctcaaatttttacccacttaaaggagatatcatacatcatctgtaaataaatacatcatctgtaaataatgatgtaaataaatacatcatctgtaaatctgtaaataatgatgtaaataaatacatcatctgtaaataaataaagtataataaaagaaaatagtaggtttttttggttggaggtgaccgtgaagtttgcaaataccatcttacaacacattattttattttatttcatttcatttttaattttattattattatactttaagttttagggtacatgtgcacaacgtgcagatttgttacatatgtatacatgtgtgaagttggtgtgctgcacccattaactcgtcatttagcattaggtatatctcctaatgctatccttcccccctcccccaccccacaacagtccccggtgtgtgatgttccccttcctgtgtccatgtgttctcattgttcagttcccccctatgagtgagaacatgcggtatttggttttttgtccttgtgatagtttgctgagaatgatggtttccagcttcatccatgtccctacaaaggacacgaactcatcattttttatggctgcatagtattccatggtgtatatgtgccacattttcttcatccagtctatcattgttggatatttgggttggttccaagtctttgctattgtgaagagtgccgcaataaacatacgtgtgcgtgtgtctttatagcagcatgatttataatcctttgggtatatacccagtaatgggatggctgggtcaaatggtatttctagctctagatcactgaggaatcgccacactgacttccacagtggttgaactagtttacagtcccaccaacagtgtaaaagtgttcctatttctccacatcctctccagcacctgttgtttcctgactttttaatgatcgccattctaactggtgtgagatggtatctcactgtggctttgatttgcatttctctgatggccagtgatgatgagcatttcttcatgtgttttttggctgcataaatgtcttcttttgagaaatgtctgttcatatccttcacccactttttgatggggttgtttgtttttttcttgtaaatttgtttgagttcattgtagattctggatattagccctttgtcagatgagtaggttgtgaaaattttctcccattctgcaggttacctgttcactctgatggtagtttcttttgctgtgcagaagctctttagtttaattagatcccatttgtcaattttggcttttgttgccattgcttttggtgttttagacatgaagtccttgcccgtgcctatgacctgaatggaaatgcctgggttttcttctagggtttttatggtttgaggtctaacatgtaagtctttaatccatcttgaattaatttttgtataaggtgtaaggaagggatccagtttcacctttctacatatggctagcctgttttcccagaaccatttattaaatagggaatcctttccccacttcttgtttttgtcaggtgtgtcaaagatcagatagttgtagatatgtgacattatttctgaggactctgttctgttgcattggtctatatctctgttttggtaccagtaccatgctgttttggttactgtagccttgtagtatagtttgaagtcaggtagcatgatgcctccagctttgctcttttggcttaggattgactttgcaatgcggggtcttttttggttccatgtgaactttaaagtagttttttccaattctgtgaagaaagtcattggtagcttgatggggatggcattgaatctataaattaccttgggcagtatggccattttcacgatattgattcttcctacccatgagcatggaatgttcttccatttgtttgtatcctcttttatttcattgagcagtggttttagttctccttgaagaggtccttcacatcccttgtaagttgggttcctaggtattttattccctttgaagcaattgtgaatgggagttcactcatgatttggctctctgtttgtctgttattggtgtataagaatgcttgtgatttttgtacattgattttgtatcctgagactttgctgaagttgcttatcagcttaaggagattttgggctgagacaatgggttttctagatatacaatcatgtcgtctgcaaacagggacaatttgacttcctcttttcctaattgaataccctttatttccttctcctgcctaattgccctggccagaacttccaacactatgttgaataggagtggtgagagagggcatccctgtcttgtgccagttttcaaagggaatgcttccagtttttgcccattcagtatgatattggctgtgggtttgtcatagatagctcttattattttgagatatgtcccatcaatacctaattattgagagttttcagcatgaagggttgttgaattttgtcaaaggccttttctgcatctattgagataatcatgtggtttttgtctttgggtctgtttatatgctggattacatttattgatttgcatatattgaaccagccttgcatcccagggatgaagcccacttgatcatggtggataagctttttgatgtgctgctggattcggtttgccagtattttactgaggacttttgcatcaatgttcatcaaggatattggtctaaaattctcttttttggttgtgtctctgcctggctttggtatcaggatgatgctggcctcataaaatgagttagggaggattccctctttttctattgattggaatagtttcaggaggaatggtaccagttcctccttgtacctctggtagaattgggctgtgaatccatctggtcctggactgtttttggttggtaagctattgattattgccacaatttcagatcctgttattgctctattcagagattcaacttcttcctggtttagtcttgggaaggtgtatgtgtccaggaatttatccatttcttctagattttctagtttatttgcgtagaggtgtttgtagtattctctgatggtagtttgtatttctgtgggatcagtggtgatatcacctttatcattttttattgcatctatttgattcttctctctttttttctttattagtcttgctaccggtctatcaattttgttgatccttttaaaaaaccagctcctggattcattaattttttgaagggttttttgtgtctctatttccttcagttctgctctgattttagttatttcttgccttctgctagcttttgaatgtgtttgctcttgcttttctagttcttttaattgtgatgttagggtgtcaattttggatctttcctgctttctcttgtgggcatttagtgttataaatttccctctacacactgctttgaatgtgtcccagagattgtggtatgttgtgtcttttttctcgttggtttcaaagaacatctttatttctgccttcattttgttatgtacccagtagtcattcaggagcaggttgttcagtttccatgtagttgagcggttttgagtgagtttcttaatcctgagttctagtttgattgcactgtggtctgagagacagtttgttataatttctgttcttttacatttgctgaggagagctttacttccaagtatgtggtcaattttggaataggtgtggtgtgatgctgaaaaaaatgtatattctgttgatttggggtggagagttctgtagatgtctattaggtccgcttggtgcagagctgagttcaaatcctgggtatccttgttaactttctgtctcattgatctgtctaatgttgacagtggggtgttaaagtctcccattattattgtgtgggagtctaagtctctttgtaggtcactcaggacttgctttatgaatctgggtgctcctgtattgggtgcatatatatttaggatagttagctcttcttgttgaattgatccctttaccattatgtaatggccttttttgtctcttacgatatttgttggtttaaagcctgttttatcagagactaggattgcaacacctgcctttttttgttttccattttcttggtagatcttcctccatccctttattttgagcttatgtgtgtctctgcacgtgagatgggtttcctgaatacagcacactgatgggtcttgactctttatccaatttgccagtctgtgtcttttaattggagcatttagcccatttacatttaaggttaatattgttatgtgtgaatttgatcctgtcgttatgatgttagctggttattttgctcattggttgatgcggtttcttcctagccttgatggtctttacaatttggcatgtttttgcagtggctggtactgactgttcctttccatgtttagcgcttccttcaggagctcttttagggcaggtctggtggtgacaaaatccctcagcatttgcttgtctgtaaaggattttatttctccttcacttatgaagcttagtttggctggatatgaaattctgggttgaaaattcttttctttaagaatgttgaatattggcccccactgtcttctggcttctagagtttctgccaagagatcagccgttagtctgatgggcttccctttgtgggtaacccgacctttctctctggctgcccttaacattttttccttcatttcaactttggtgaatctgacaattatgtgtcttggagttgctcttcttgaggagtatctttgtggcattctctgtatttcctgaatttgaatgttggcctgccttgctaggttgcagaagttctcctgggtaatatcctgaagagtgttttccagcttggttccattctccccatcactttcaggtacactaatcaaacgtagatttaatcttttcacatagttccatatttcttggaggctttgtttgtttctttttactctctttcctctaaacttctcttctcacttcatttcattaatttgatcttcattcacttatatactttcttccacttcatcaaatcggctactgaaggtattgcatgcatcatgtagttctcatgccatggttttcagctctatcaggtcatttaaggtcttctgtacattgttttctctacttagccattcgtctaatcttttttcaaggtttttagcttccttgtgatgggtttgaacatcccctttagctcagagatgtttgttattactgaccttctgaagcctgcttctgtcaacttgtcaaagtcattctccatccagctttgttccattgctggtgaggagctgcgatcctttggaggagaagaggtgctctggtttatagaattttcagcttttctgctctggtttctccccatctttgtggttttatctacctttggtctttgataatggtgacctagagatggggttttggtgtggatgtcctttttgttgatgttgatgctgttcctttctgtttgttagttttccttcgaacagtcaggttcctcagctgcaggtctgttggagtttgccggaggtccactccagaccctgtttgcctgggtatcaccagcggaggctgcagaatagcaaatattgcacaacagcaaatattgctgcctgatccttcctctggaagcttcgtctcaaaggggtgcctggctgtatgaggtgtcagttggcccctactgggaggtgtctcccagttaggctagatgggggttagggacccacttgagaaggcagcctgtccattcacagagctcaaacactatgctaggagagccactgctctcttcagtgctgtcagatggggatgtttaagtctgcagaaatttctgctgccttttattcagctatgccctgcccctacagatggagtctacagaggcaggcaggcctcattgagctgcggtgggctcctcccagttcgagcttccagaccactttgtttacctactgaagcctcagaaatggtgaacacccctcccccacccagtctgccgccttgcagttccatctcagactgctgtgctagcagtgagcgaggctccatgggcgtgggacccactgagccaggcacaggatataatctcctggtgtgccatttgctaagaccattggaaaagcacagtattaaggtgggagtgtcccaattttcccagtacagtctgtcacgggttccctcatctaggaaaggtaaatcccctaaccccttgtgcttcccggtgacgcaatgccccaccctgcttcagctagccctccatgggctgcatccactgtccaaccagcccaatgagatgaacaaggtacctcagttggaaatgcagaaatcacccatcttctgtgtggatcaggctgggagctgcagaccggagttgctcctattcggccatcttggaatggcaatctatgtttgctttttacatttgaaaaaactggtgtcacgtacctaggtattaatcattgtggtatcctcttgccgatttacctctttatcattaactagtgaccctccttgtcttttgttgttacagtctgtgattttagtctattttatctaatatgagaatagctactctggcacttttttggtttccagcttcatgaaatatccttttccatttccctgttttcatttccctttcggtgtctctatagatgaagttgatttctttaaggcaccataagttgggtcttatttctttatccatttgaccatttagagaatttagaacactgtcagtgttattattcataagtaaaaacttaagagtgggtgtagtggtgtacatctgtatttcctgcactttgagagactgaggcgagctgatctcctggggtcaggagtttgagaccggcctggtcaacatgatgaaaccctgtctctactaaaaatacaaaaattagccaagcatgctggcatgtgcctgtaatccaatttacttgggaggctgaggcaggagaagcttgaacctgggagacaaatgttgcagtgagctgagatcacacagagaagtcatctccactctcctcatcagaacctcttgttcacagcatttgtgagcacaaatcaatgatggttattctttcctactaattagggatattttattacacagcaatagcctccagcaaagggaaccatcatacatgattcctacaagttgacagggctggaattatcactgaaaaactaaggtggctatacttgattcccaatgtccaatttttcatgaatagagaaatttatcctttttccccccagccagaaaccaagttttgctcttacgcccaggctggaatcaagtggcacaatctcagctcactgcaacctctgccccccagcttcaagaaattcaccttttgaacaaggagatattaaggatacactatgtgtatgctaccggtggttgcaggagactcagaaaagagagaaacagtcactggcctcgtgcaactgatattctcgggaggagagaaaggcaatcaagaaagaaacatgctgtatttcagacagctgtaagtcctccacaagaaaagaaagcaggtgaggaacataggaaatgtgtcaaccataaggttcccgctaattctataagttggtcagggatatcctccaagaataagcagcatctgagcaatcacctgaagggaggaaggaaggaagactgtgagtggtggcttacacctgtaatcccagcactttgggaggccaaggagggcagattgcctgagctcaggagttcacgaccactcagagcaacctgttgatacccaatctctactaaaaacacacaaaaaaattacccgggtgtggtggcacgcacctgtagtcccagcttccatgcccagctgatttctctctctccatatatatatatatatacacatatattgtttttgcagagatagggtctcactgtgtcacccagtcatcaagcaattctcttatactgttttggaaaagcatgggaattacaggtgtgaaataccctgctggtcctgaaaaatgtgatatttgggattctctgcctggcttgttttacccaaaataatgacctccagttccttccaggttgctgcaaaagacatgattttcactgttttataactgaatagtattcctgtatgtatacataccacattttctttatttattcttctgttgattgacatgtagggtgattccatgtctttgctactgtaaataatgctgcagcaaatatttgtgtgcattttgatctattcctttgagtaggtacccagtactgcaactgcaggactgagtagttgttatattttttgttctttcagaaatctccatagtgtttgccataaaatctgcactaatttacattcccaacaacaatgcataagatttccccttttctccacattctcactaacatttgttatgtttttgtctttttcataatacccattctgactggagtaagatatctcattgtggtggttgttgatatttttgagacggggtctcactctgttgccagactggagtgcagtggtgtgatcgtggcttgctgcaacctccacctcccgggttcaagcaattctcctgcctcagcctcccgagtagctgggactacaggcgcgtgccaacaggcctggctcattttttgtatttttagtaaagacagggtttcaccatgttggccaggatgatcacagtctcttgagctcatcatacacctgcctcagcctcccaaagtgttggaattacagtcatgaggcagcgcacccaacctcaatgtggttttaatgaccatttctctgacgattcatggtgtggagaatttctttgaaataccttttggccatttatatgtgctcttttaaaaactgactcctgtccaggtgcggttgagcatgcctgtaaccccagaacttcgggaggctgaggccaatggatcacttgaggcaaagaggcagaaatcagcctggccaacaaggcaaaaccccatctttactaaaaatacaaaaaatcagccacgggctgtgactcgtgcctgtggtgcaagttactcaggaggttaaggcacaggaattgcttgaacccggtaggcacaggtcacagtgagccaagatcatggcactgcactacagcatgggtaatagagaaagacctgtctcataaaaacaaatgaataaataaataagataaaaaataaaaaagtctctttatgtcctttgccgactttttaatgggattctttggagttttctgttgtagttgagatctttgtttactctcggtattagtcttttgtcaaaggaaaagtttacaaataatttcttccgttctgcagtttgtctgctcactctgttgagaggattatttctttggctgtgcagcagctttttgtttcagtaaagcttttgaatttatataattaaaattttcagtttggtttaaatttgcactggtcgatttttggttttgttgcctgtacttttgaagtcatactcttgaactctttactagacaataaccagaagagttttctctagttttcttctcacatttttattatttcagtacatatatttaagtctataattcatcttcaattgatttttgtagaaatagtgagaaataggagtccaggtttattcttctgcaaatgacaattcaattgttccagcaccaattattgaaaagggtgtgctttcctcaacgtatattcttatcagctttgtcaaagatcagttggctataaatgtgtggctttctttctgggctctctagtctgttacatcaatctgtgtgtctatctgtatactactaccatgctgtattggtgatgatggctttgtaatataatttgaagtcaagaaatgtgatgctcccagctttgtttatttgcttcagaaaggctgagtcaacagctgcagagatgaagctgcccctcctcgcagggctccttcccggaaaaagatcatggctcccactgaccatataaccatggctggaactcctgaaattcccaaagggaggccctacccagtgaggggggatgaatgaaggtcctacttaaggaatctgtctggccacaatcaggcacagcagctgtgctgccttgtgggggaccagaccacctggattccctggagcctgcaggctagaatgtctgagtccatggaaacacagaaatggaggccgccctcacctccccagaaaactgtagtctcaggcagtctccagccgattgccactggttggctgctattccaagccagtgggtcttaacttgagaggtgctgtggaagtggggcccacggaatgaggctgcttggctccctggattcagccccttttctaagggaatgtacagatggaactcccgccttgcccagctttccaagtatataaaactcctgagtctctgtgagtgtctgagcgagtgctctggcaacattcgacacggctctgtgtatctgacccaagacccttatggcatgagctaatgggaggatcttctgatccatgcgtggcaaagatgcatgggagaaacatggtttgtgggtaggggttgtgcattcactactgcttctcttggctgtaggtgaaggtttctttggctctgtgctgatactgggtgcaccatcacccaccccctttgtttcttctcctgggtcaagtcatttgcctaatcagtcccaatgtaggaacctggatacttcagttcaaggtgctgaattcaccgtgcttttcattcaggggaagacagctgcttctcattgggcatcttggcctgcccacttcacgtcactttttgtaaaatccacaccactccaggaatatccattacttaacttcgcctgaaataaacagaaggctcattacacttatcatgggctcacttacttcgcctataatgaaggtgccatggaaatgctagtggatgacgtggtccattttcttagggatgagatagaaaaatggtgtatggctttttaatttaattaaaatttttagtttggtttaaatttacattggtctctttttggttttgttgcctgtacttttgaagtcttactcgtgaactctttactggacaatgaccagaagagttttccctaagtttcttctgatattttgaccatttcagtacatacatttcagtctataattcactttaaattgatttttgtaaacatggtaagaaataggagttcagatttattcttccgcatatgataatgcaactgtcccagtaccaattattgaaaagggtgtgctttccctagtgtatattcttgtcagctttgtcaaagatcagttgcctatgaatgtgtggctttcattttggattctctcgtctgttacatcaatctgtgtgtccacatttatacctgtaccatgctgtattggtgactatggctgtgtaatatattttagagttaggaaatgtgatgctcccagctttgttcatttgcttcagctgaaaaggttgagtccacaattacaaagatggcagccgcccatccccggaggacctccaacccagaaagagatcaggcttcccaccaaccctataaccctggctggagttcctgaaattccaacagggaggaccttcccagtgaggagggatgaatcaaggtcaaatttaaagaaacagtctggccactatcaggcacagcagcagtgctgccttgtgggggacccctcctgctccagaccagctgccctccctggagcccgaaggctagattgtctgagtctacggaaacagagacggtggccgccccaaccacccagaactcggtagtctcaggcacttggcttgctatcttgccactgcttggctggtattccaagcccgtgggacttgagaagtgctgtgatgatggggaccacaggatgaggctgtctggctccctgtgatatggctgtgatgagtggaggaacaccagggctcatgtctcacacagaattggagaaaatgacacaaacacatgtacagtggttttatggcgtgcagtttaataggcaagaacgaaggaagagctccccatactgagacagagggaggggggctccaaagccaaaagaggaaacccggagtgctgtggataccaatgagttatatgaagaaactggagggggcggtgtctgatttgcatagggttcaggcgattggttcgaccaggcatgtcatttatgtggcccacggaaaaactggccctcccacctagcctttgaatatgcacgtgccggacaccctgatttcctacactcatggggatatatgggggtggccatatcgccaggcacaggtggggacaagggccagaagagggcgggaatcgctatgtttgggtggacccagtttctaatggccggcatctgcagatcaaggttaccggagaactctaaaagccggggctttcctgctagacaagactcatttctggagctgctttaaaaagaaacaaaacttcccaaggaccccttttcctccctgtctgcccaaaataatttcttaacaactcgtataacacctgaattcagcccccttactgggggaatgtaccaacggaactcccacctttcctggtttctcaaggctagattgtgtaaacctcctgggtctcggtctgtgtctgagcagctgctctgccaacactccacacagccctgtgtactaggcccaaggccgccgtgactcagcccatgggaggatctcctgatttcttggttgcaaagatccatgggagaaaaatggtttctggggcggggtcacacactcatggcttctcttggctgtgcaagaaggttcctttggctctgttccaatatagcgtggttcatcacccacccctgttttctttgttctcctgagtcaagttgtttgcctagtcagtcccaatgtgagaacctgaatatttcagttcacgtgcttatcgtgaaattcactgagactttaattcagtggaaggcagcctcttctaattggccatcttggcccgccccctccacgtcacctcccataaaatggccacgctctccagggacgatgccattatatatctttacgtgaaaccgacagaacacttattacactttttgtgagctcatttacttcacttataatgaacatggccatggaaatgctagtggagaaagtggtcgattttctgatggatgtgataaaaaaatggtttgccgaccaattaatgacatatgtctcaaaactagtaacgagacccttaatcgctgggttgaagtttctaatcaagaagatgctcatctatgtattcaacaaagcagcttcccttgcttctgaaatgcttccaaacaacatctcatatttcctgaagaagataatgcctggacaagcagcacaagtcattcaggtttactttcagctcataaatccagcaggatattcgcacaattgttgggaaaccttatcagttcatgagtcgtgcatgtttcctttaatttcaggaggaagagggtaatctggaagagtttcctgacctactctgctgctgtgattaaacaaccaccaggaaattttgatgacactgttctcctgagctcctccctttcctcggggaagaaaagcattgaaactacaaaaataaagtgttatttggctggagtgaggtctcatgtctgcttatgcggtggctcgctgctcagaacagggtgagtctctgagttgtacgctgaggaggggaggctgtcaatctagaaaaaacccattgcatgggacacctccatggggtctggggggctgaggatgaggagctggactggatctagggaaggaggaggtttcagagggtgaaattctggcagtaaatcctgggggtgtttgaaaacttcctccctcagaaggagaagactcagggaggaataaggacaaaccatgggtcccttgaggggcatttactaacttaagaggactttatcgggaagcagagtgacaatggcctccttgaggactgaggcccctggataaatgaggcccagatccagatccagtccatgggagatgagaccttcaagggacatatttttgttgggacagaggaaaagtgcagctctgcagctgcagaggaagccttggcagtgtgaaagcgaccttggagggggccctgtgcgttctgaatgcttctgaggtccatcccctgtccccgcctctttttctggattttttgggctccatggtctccgccatcttctgagcgctccacgctgccaccttcagttttctcttctgggctccaaatactccaaaatctttcatatctgtgcccctacccctgtttttagcatgtgttgggactccaggtccctgaaggtttctggcctgaaatccacctccccagcggtgtggattctgctctagagaccccgcacttggcaaggttcccaggcccctgggggacaaccgagtggtatgtgcacttcagggctccacactcggcaaggtctttcaagcccttggggttccctcctcagttttcttcacatgtctgggatgtagtcactctataaatgccgggatgtgatccccaccccagtgattttttttagttccatgagtgttgctatctgaatagtcatcctgagagtgatgggaccttttgaatttgcagcaagttttagattagtgtgagtggcctgagatcgcaaaactggggctagcattggatgtgaggttaggctggtggaaaaatttgcccagaacctgaggagtgtgggctcactgcaggtggttaggatcagcacagaattgcaaggatgtatagctttggggtaaagaataacatggttcagaagtacatgtattagtcttttcatgcattgctataaagaattacctgagactgggtaattaattataaaaactcaggtttaattggctcatggttccacaggctgtacaaaaaggatgatgctggccatcagctcaacttctggggaggcgtcagaaaacttagagtcatggcaaaaagcacaagggaatcaggctcatcctccatggccagagctggagctagtggtaggagaggtgctgcacacttttgaacaatcagatctttttagaactctatcaccagacagcacctagaggatggtgctaaattattcatgaaatatccacccatatgatccactcaattctcaccggcccaaccaggaccacctccaccattggggattacaattacacatgagatgtgggtggggacacagatccaaactcgatcagtgggcatcttggactgggtctactatagaagaagaaccaggagctgactatcatccttaagactgcccatgatggccaggcagggtggctcatgcctgtaatcccagcactttgggaagccaaggtgggtgaatcccctgaggtcaggagtttgagaccagcctcgccaacatggtgaaaccctgcctctactaaaaacacaaaaaattagatgggtgttgtgccagacgcctgtaatcacagctactccagaggctgaggcatgagaattgcttgaacctgggaggcggaggtggcggtgagccccaatcgcactgctacactccagcatgggcaacaataccaaaacatcgtctcaaaaaaaaaaaaaaaaaaaaaaaaggctgcccatgaccactgccccagtgagagggacaccagcatggctaagatcaagtgctggacattcttcatgggtcagacattaaagcaggccacactgttacagagatgggctccattcatagcaacaaagtggtgagaagatgtgggaatggcagaggccagcactttgccatcaatgcaaggtgggcataaggagctggcaccagtgccagagtgcatcaggggaggactgctttgcaatatctagcacttacctcttagagtatgtttcattagggacaacagatataaatggcagacaagtgagtcccttcagtaacaggaaatagaaatcatcaagaggaacagaaacagatgtcagcagccctcatataaagtcatcatccttcatccagttaaaacctgagacagttctcacataagaaggtctaattcaaaaagagactgggttctcatgaggcaggttcatgcaaaaccaagggaagtatacaactttgggattctccagcttcccttggaaaagacctacaatcatttgcttaggtaactgagcactgaacaaaggtgagtattgttatctttcagaagctgttggccatgaaggtcttgctggcataaaacccatggttggaaacatcaccatgacccctgttagagtaatggcctaagggcaagggtcaggaaattgatgtattccttgccaacttctgcgagacgagtgttggtccactcatctctttcacggaattcaccagtctggtatcttcaaaatccagaaggatgatggcagatggcaggaaactaatgcaaacaccatcagttgtacctccactgtagcagcagtaatggatgttatctcttcattgtaatatccagggagggagaagatgacattattctcaatattctaaacaccctgtgtgtacagcctctgtgatattttttgtaatatccgtgtgggagagaattatattactcctaatatctcaggggttgtgccccctctgtgacaatgttcctaacacccaggaggggataggatgatatcacttttagcatcacagggggtgtacaccccactgtaatattgttcataatatccgggggggagagaatgatattactcccaatatcgcaaagactgtacaccaacctgtgatattatttgtaatatccataagaggaagaataatattactcccaatgtcacaggaagtgtacacccttctgtgatattgttcaaaagatccagttagggaggggatgatattactctcaatatcttaaacaccctgtaggtaagccctctgtgatattcctcataatatccagagggagaggatgatattactcccaatattgcatgaagtctacaccccacctgtgatattgttcctaatatccaggatgggagaggatgatattactcccaatgtcgcaggggatgtacaccttccctgtaatattgttcgtaatatctagaaaaggagaggataatattactttcaacatcgcagggggtgtacaccttccttgttatattgttgctaatatccagggaaaaagaagatgacattaccaccactattgcagaaggtgtacacccccccttgatatagttcctaatatccagaaaaggagaggagatattactccaaatattgcaagaggtgtacattcccctgtaatatttttcctaacattcaggaagaaagagagtgatattgcccttaatattgaagggagtgtgccccccccgtgatattgtttctaatatccaagaaatgaaaggatgatattactcccaatatcacaggggctgtacagccccctcccatgatattgttcccaacatcggggggggggtgaaatagtattattcccagtatcacaataggtgtacacacctgtcgtgatattgttcctaatacccatgggggaaaggacgatattattcttaatatctcagagggatgtacaccctccctgtgatattgttcctaatatccggggtgggagaggatgatattacccccaaaatctcaaagggtgtacacccctcttgtgatattgttcctaatatccagggtggagaggataatattattcccaatatccaggaaaggaaacgatgatgttactgtgaatattccagggggtgtcctcccctctgtgatattgttcctaatatccaggttggggagattatgatatttctccaaatatcacaaggggtgtacaccaaccctgtgttattgttcctaatatcgatggggggagaggacgatattactcccaatatcacagggggtgtacaccacctttatgatattgttcctaatatccatgaagaaagaggatgatattactttcaatatcgcaggggatgtacactccccctgtgatattgttagtaatacctaggagaagaaagtgtgatattactcccaatatcgcaggggatgtacacgcttcctgtgatattgttcctaatatttagggggaaaggggatgatattactcccaatatcgaatggtgtgtacacccccccgtgattctttttttttttttttttttttttttgagatggagtcttgctctgccgcccagactggcgtgcaatggcgcaatctcggctcactgcaacatttgcctcccaggttcgcacgattctcctgcctcagccttcggagtagctgggattataggcagctgtcaccataccaggctaatttttgtatttttagtagagttggggtttcaccatgttggtcaggctggtcttgaattcctgacctcaaataatccacccaccttggcctcccaaagtcctgggattacaggcataactttccctgtgatattcttcctaatattcaggaagaaagaggatgatattgctcccaatatcgcagagagtgtgcactcctcctgtgatatggttcttaatattcagaggaggagaggatgatattactttctatattgcagaaggtgtacacctccctcgtgatgtctttcctaatatccagtgggggagaggttattagtctcaaaatcacagaaggtgtaaacccccatttgatattgttcctaatattcaggggtggggagagaaaggtattactcctagtatttcagggcatgaacacccccaccgtgatatcattcctaatatccagaaggggaggcaatgatatttctcctaatatcacaaagggtgtacaccccttctgtgatattgtaaatattctgtgtgtacacccccctgtgttatagtctgtaatatccgggtgggggagagggtgatatttctccccatattgtaggggatgtacacccttctgtgatatggttcgttatatccagggaagaaaaaggtaatattgctgcccatattgtggagagtgtacacccccatgtaatatggttcgtaatatccaggagtggagagggtgatactgctccttacatcgaggaaggtgtacaccttattgttatatgattcgcaatatccaggggaggagagagtgatattgctccccatgtcgcagggggtgtaaaccctccgtgatatgattggtaatatccaggaaaggaaagggtgatatttctccccatatcgcgggggacgtacatcctcctgtgatatggttcgtaatatccaggaggaaagaggaaaatattgctcttcataacccgaggggtgtacaacccctgtgatatggttcgtaatacccagaagtgtacacccctctgtgatatggtttgtaatatccagggggttagagggtgatattgctccccatatcgcagtgggggtacacccccctggattggttcataatattcatggggggagaaatttacatttatcctcatatcagggggggtgtacaccccccgtgatatggttcgtaatatccaggggaagaaagggtgatattgctccttatatcgcggaaggatcaccctcccctgtgatatggttcataatacccagacgggaagagggtgatattgttcttcataaagcgaagggtgtacagccccctgtgatatggttcataatatgcaaaaggggagagggtgatattgctccccatatcacggagggtgtactcccttctttgatatggttcgtaatatccaggggtgtagatggtgatatagctcgccctattggggagggtgttcacccctctgtgatattgttcgtaatgtccagggaaagagaggatgatattactcccaatatcgcagaaggtttacaccactctgtgatattgttcataatatccagggaaggagaagacgatattactcccaatatggcagggggtgtagaactcctgtgatattgtttgtaatatccaggcaaggagaggatattactctcaatatcgcagaaggtttacacccctatgtgatactgttcatgatatccagggaaaaagaggatattactccctatatcacaaagggtgtacacccctttgtgatattttttgtaatatccaggggagagaggataatattactctcaatatcagaaggggtgaaaaccctcctgtgtcattgttcataatatttagggaaggagagagtgatattactccaaatatcacagtgggtgtacacccccctatgatattgttcctaatttccagaaggggagatatgatattattgccaatatcgcagaaggtgtacaccttactctgacattgtttgtaatatccagatggggaaatgatgatattactcctaatatcacagggggtgtacacccccttgttttattgtttgtaatattcaggggaagagacgattatattactcccaatatcgcagggtgtgtacaacactctatgatattgttcataatatccaggggaggagaggaagtgtacacccccccgtgatattgttcgtaatatccagaggtagagaggatgatattactcccaatattgcaggtggtgtacacctttctgtgatattgtcatgatattaagaaggggagaggatgatattactaacaatatcacaaaaactgtacactccctgtgatattgttcataatatccagaagaagggaggatgatattattctgaatctcgcagaagatatacaccaccctgtgatatggttcataatatcctaggggaaagaggatgacataactgtcaatatcgcagggggtgtacaattccctgtgatattgttcacaatattcagagggaaaaaggataatattactttcaatatcgcaggcggtgtacacattactgtgttattgtttataatatccggaatgagagaaaattttctcccaatatcacaggaggtgtacactcccctgtgatattgttcgtaatatccagggaggggagaggatactattactcccaacatctcagggagtgtaggccccccctttgatattgttcctaatattcggaagtggagaagatgatattacttccaaaatcgcagggggtgtacactccctctgtaatattgtttctaatattcatgagtggaaagaaagatattactcccagtattgcaggggacatacaccacactgtgatcttgttcacaatattcgggggggagaggatgatattactcccaatatcaaagtaggtgtacacccccttctgatattgatcgtaatatccagaattaaagatgataacgttactcccaatattgcagggggtgtacatttttgaatactgttcataatattaagagggggaggggatgatatctgtcccaatatcgcaaagtgtgtacacctcctgtgacattgtcccaaatatccagaggaaaaaaggatgttattactcttaatatctcagagagtgtacacctccctgtgatattgtttgtaacatccagaagaaagaggctgatattactcttaatatcgcagggggtgtacacccccgccccgggatattattcgtaatatccagggggaagtggaatgttcagaatgggagaggatgatattacttgcaatatcatagtgggtgtacaccccactgtgatattgtttgtaatatccgggaaaggagaaaatgacattcctccccatatggcaggggctgtacaccacctatcatattgttcaaaatatccagaaggggagaggatatgtctccaagtatcacagggggtgtacaccccgctgtaatattcttcctaatatccagggtgtgagaggataatagtactcccaatatcccagggcatgtacaccccccttgtgatgttgttcctaaaattcatggggagaaagaatattactcccaatatcacagggggtgtacatacactctgtaatattgttgccaatatgcagcaggagagaggatgatattactcccaatatcacaggggctgtacaccccgctgggatattgtttctaatatcaagggggaaaaaggatgatattactcccaatgtcgcagggtgtgtacttcctctttgtgacattgttcctaatatccaggagagaagagggtgacattccttccaaaactgaaaggggtgtacacaccctttgagatattgtctttaatatccagaacgaaacaggatgatataactcctaatactgcaggggggtacaccctctctgtgatactgtttctaatatccaggaggggaaagaaaaatattaatcccaatatcacagggggtgtacattccccctttaatattgttcctaatatccaggaagacacaggatgatactatttccagcagcacagggcatgtacacccctttgtgatattgttcctaatatccaggaaaagagaggatgatattactgtcaatattgcagggcgtatacactggttctgtgatattgtttctaatatccgggggtggagaaaatgatattactcccaatattccagcgggtgtacacccgttctatgatattgttcctaatatctgggggagagagaatgatattattgtcaatatcacaggggatgtacagattccctgtgatattgtttctaatattcacagggggagaagggtataatactcccgatatcgcagggggtgtacactccccctgtgaagttgttcctaatatccagggattgagagaatgatattactcccaatatcacaggcggtgtaaaccccctgtgtgatattgttcctaacatccagaggaaaagatgatgatattattttcaatatcacagggggtgtacgcatccctgtgatattgtttctaatatccaggggaggagaggatgatattattgttaatatcgcagggggtgtaccccaccctgtgatactgttcctaatatccggggtggaagaggataatattgctcccaatatcgcaaagggtgtacaaccttcctgagatattggtcctaatatccagggagggagaggatgatattactttcaatatcacagggagtttacacaacccctgcgatattgttcctaatatccagcggaagaagagttaggataatactattttcaaaattgctgggtctgtaccccctccccgtgatattgtttctaatatccaggaggggagaaagtaatatgactcccaatatcttagaagatgtacaccctccccataatattatttcttacatccagggggtagaggatgattttgctttcaatatcacagagggagtaaacctttccggtgatattgtttttaatatttaaaaagagagaagataaaattactcccaatacaaaggggatgtattgtgtactcccccctctgatattcttttttaatatccagatggagagaggatgatattactttcaatattgcatgggatgtataaatcccctgtgttattgttctgaatatacaggtggggagagtatgatattactccaaatatcgcagggggttctttccccctgtgatattgttcctaacattcagggagggagaggatgatattactcttaatattgcagggggtgtacccacgcctatgatattgttcctaatatccagagggggagaggatgatctaactcagaatatgacaaggggtgtacacacagcctgtgatatggttcctaatatacaggggagaaggggataatatttctcccaatatcgcagggggtgtacaaccccctgtgatactgttcctaatatacagaaggggacagcatgatattgttcctaatatcgcaggaggtgtacaacgccctgtgatattgttcctaatatccagggcgggagaggatgatattaccctcaatatcgcagggggtgtgcactttccctgttatattgttcctatgatccgggtggggggaaatgacattagtcccaatatcgcaggatgtgtgcaccgctcccccgtgatattgttcctaatatcaagggggagagaggaggatattactcccaatatcgcaagggatgtacatcctccatgcgatattgttcgtaatattcaggaggagagaggatgatattactcttaatatcgcagaaagtggacacccaccctgtgatgttcttcataatatccagggaagcagacgattatatgactttcaatatcgctgggagtgtacatcccttttgggatattgtttctaatatccaggaagggagaggattatattactctcagtattgcaggcagtgtacaccttttttgtgatattgttcctaatattcagaaagggaaaggatgatattactcccaatattgcaggtggtgtatatccccctctgatattgttccttatatcaaggaagagaaagaataatattactcccaatatcaaagacagtgtagacccctcctgtgatattgtatttaatatccatggggaaagaggatgatgttactcccaatatcgcagggggtttacacccacactgtgatattattcctaaaatccagtggaggagaaaataatattgctcccaatattgcagggtgtatacaggccctcccccgttatattgctcctaatatccagcggtggagaggatattactttcaatttgtgtagggagtgtatacccccctgtgatatttttctaatatcaaggatgggaaaggatgacattactcccaatatcgcaggaggtgtacacgccctgtgatattgttcctaatatctagggaaggagaggatgatattactttcaatattgcaggagctgtacaccctctgtggtattgttcttaatatttaggttgggagaaaatgatatgagtccaaatatcgcagaaggcatacacacttccaataacattgttcttaatatccgggggagagggtgatattactcccaaaatctctggggggtgtacacccccttctgatatttttcctaatatccagggaaggaaacgatgatattactataaatattccaaggagtgtacaccttcctaatatcctaatattgttcctaatatccaggggtgggagaggattatattactcccgatatcgcagtgggtgtacacccctcctgtgatattgtttctaatatccaagctaggagaaaatgatatcactctcaataccacagggggtgtacaccttccgcatcatattgttcctaatattcagagggaaagaagatgaagttactttcaatatcggaggggttgtacacaacccctgtgatattgctgctagtatccaggaagaaaggggattatgttactccccttatagcagggggtatacacctcccctgtaatattgttcctaatatcaaggctgggatatacgtggggggaaggatgatattactcccaatatcgcaggggttatacaaccttctgtgatattgctcctagtaaccagggcagaagaagatgatattactcctaatatcgcaggaggtgtacactcccccattatgttgttcccaatatgcagaaaaggagaggatgacattattgccagtatcgcagggtgtgtacaccacccctgtaatattgttccaaatatttagggggagagaggatgatattactcccaacatcgcagggggtgtacacacatcccctgtaatatagttcttaaaatctaggggaaaaggggatcttatttctctaaatattgcagagggtgtacactccccggtgatattgttcctaatagccgggagggagataattaaattactttcaatatctcagagagtgtacatcgcccttgcgatattgttcctaatatccagagcaaaagagaatgatattactcccaatatcttaggagtgtacatttaacctgtaatattgttcctaatatccagggggaagagaatagtattactgccaatatcgtaggggttgtacaccttttctgtgatattgttgcaaatatttagtagagggaaagaatattactcgcaatatcacagggaatgtatacttcccctgtgatattgttctgatatccagaaaaagagagggtaatattactcccaatattgcagggggtgtacaccccccttgtgatattgatcctaatataaaggaaggaagaggatattactcctcatatagaaggggttgtccaccccccttgtgatattattcctaatattcagggaagcagaggatgatattattttcaatatcacagagggtgtgcagtccacctgtgatattgttcttaatattcggggggagaggatgttattatgcctgatatcgcagtagaggtacacccctcaagtgatactgttcctaataaccaggggtgaagaggatgatattactcccaatatcgcaggtggtgtacacccccccatgatggtttctaatatacagagggggagaggaaaatattactcccaaaatcgctggaggtctacaccccccttgtgatattgttcctaatatccaggaaaggaaacgatgatattactgtgaatattccagggggtgtacacccgctttgtaatattgttcctcatatccagggtgtggagaggattatattactcccagtatcgcagggggtgcacgacgcccctgtgatattgtttttcatatccaggaggggagattattatcaatatggcaaggggtgaacaccccctgtgatattgtacttaatagttaggttggcagaaaatgatattagtctcgatatcgcagggggtgtgcactccgcctggtgatattgcttttaatatcaagggggagaaaatggcattactcccaatatcgcagggggtgtacaccgctcatgtgatattgttcctaatatccaggtggagagaacataatattactcccaatatcgcacaaggtgtacacccctcctgtgatatggttcctaatatccatgggaggagatgatgatattactcccaatatcacaggggatgtacaccacccttgtgatattgttcctaatatccagggaagaaaacgatgatattattgtgaatattacagggagtgtacacactccctgtgatattgtttttgatatacagggtgggagaggatgatattactcccaatatcacataaggtgtacaccccccgtgatattgttctaaatatttcggtggggagaaaatgatattagtctccatatcacagggggtgtgtgctcctcaggtgatattgtttttaatatcaagagggggaggagattatattactttcattatcacagggggtgtacacccctcctgtgatattgttccttatatccaggcgaggggaaaataatattactctcaatatcgcaggaggtgtacacaccccatgtgatattgttcctaatattaagggggaaagaagataatattactttcaatatcacagggtttgtactcctttcttgtgatatagtttttagtatccagggggaaagagcatgatattactcccattgtagcaaggggtgtacacacctcctgtgatattgttcctaatatccagaagtggtgaggatgatattactcccaatatcgcagggggtatacaccccacctatgatattatttctaatatccatgggaaaagagtatgatattacacccaatgtcgcagagggtgtgtatttttcctgtgatattgtttctaatattcaggcggggagaagatgatattactctcaatatagcagaaattgtacatccccgctgtgatattcttcataataatcagggaaaaagaggatgatattactaccaatattgcaggggggttacacttcccctatggtagtgttcctaatatccaggaagaaagaggatgatattaatcccattatccaggaagtgtacacccaccctgtcatgttgttcctaatatccagcagggaagaggatgatattacaccccccccccgtgatattctccttaatatccaggaggggagaggctgatattactggatatatagcaggggtgttcataccttctgtgatattgttcctaatatccagaaaaggagaggatgatattacttccaatatcgcagaaggtgtacacctccctgtgatattgatcctgacattcagaaggggagaggatgatattactcaaaataccgcagggcatgtgcattcccttgtgatattgttcctaatacccagaagggaacaggataatattactttcaatatcgcagggagtgcacacccccctttggtatggttcttaatatccagaaggaaagagggtgctattactttccatattgcaaggggtgtacaccccactgtggtatggttcataatatccaggcagggagagggtgctattactccccacagtgcggggcatgtacaccctgctgcggtacggttcctaatatccagggggagagaggatgctatgactccctatatcgcggggtgtgtacacccctgtgtggtatgttttgtattctccaggaacggagagggtgttgttacccctcatatcgctggaaatgtacactcccctgtggtatggttcgtaatatccaggggattgagggtactgttacccccatactccccatatcgtggggggagtgcacctccctgtggtatggttcgaaatatccagggtaagagagggtgctattattccccattttgcaggaggcgtacacccccctatggtatggttcgtaatatccggggtgaggggatgctatcaaaagaagagagaaagagaccccccatattgttctatattattttatactcagtacctgttttaagaagaaacaaggaagtgaaaccaaaagcaggcagcccggcgccaggcaccagacccaaaaccagacccgaaaccaggcctgggcctgcctgaccttagcctgatagttaaaattcaacccatgacctagcaaccaatgttatccatagattccagacattgtatggaaggacattgtgaaatttcttgttctgtgctgtttcactctgattaccggtgcctgcagcccctgtcacatacccactagattgctcaatcaatcatggccctttcatgtaagatctttagtgttgtgagcccttaaaaaggacagaaattgtgcactcaacaagctcggattttgagacgctagtctttcgatgcttccagctgattaaaagccacttccttcactacctcggtgtctgtggggttttgtccgcgactcctcctgctacactatgactccccatatcaaggggggtgtacacccccctgtggttcgtaatatccagcaggggaaaaggtgctattactccccatattgcagggagtgtacacccccttgtagtatggatcgtaaaatcaaggggggagggaaggtgtaattatccccatatctcagggggtgtacacccctttgtggtaaagtttgtaatatccagggatattacagggatattatccccaaattaatacttttataatttcttatgcctgcctttactgcaatctctgaacataaattgtgaagatttcatggacatttatcacttccccaatcaatacttttataatttcctatgcctgtctttactttaatctcttaatctcatcatctttgtgagctgaggatgtatgtcgcctcaggaccctgtgatgattgcattaactccacaaattgtttataaaacatgtgtatttgaacaatatgaaatctgggcaccctgaaaaagaacaggataagagcgatgttcagcgaacaagggagataagcataaggtctgactgcctgtggggctgggcagaacagagtcacatttttcttattgcagaaaatgagtaggagaaatatcactgggaagggaacgcattcctaggggaggcctatggacggccgctctgggggtgtatcccttatgtggttgaagataagggatgaaatacaccctggtcccctgcagtgccctcaggcttgctaggattagaaattccagcctggcgaattctagtcagaccagttctctgctcttgaaccccgtttcctgttaagatgtttatcaatgacaatgcgtgcacagcaggacatggaacctcaatagtaattccattttctccctggccttgtgaccttgctaggcccttctgcccttgtgatcttttattgccatttgaagcatgtgatctctgtgacccactccctattcgtatccccctccccttttgaagtccctaataaaaacttgctggttttgcagatcaggtggtcatcacagaacctgccgatatgtgatgtcaccccggaggctcagctgtaaaatttctctttcgtactctttcactttatttctcagaccaggtgacacttaaggaaaatagaaaagaacctactttgaaatattgggggctagttcccccaatagacattgttcctaatatccagaaaaaaagaagatgatattactcccaatatcacaggggttgtgaaccccacctgtgatatggttcctaatatccaggaagggagagaatgatattactctccatattgcagggggtgtgcacatccctgtgatattgttcctaatatccaggggaggagagggtgatattactcccaatattgcaagggttgtaaactccaccctgtaatattgctcctaatatttaggatttagggggggagaggataatattactcccaatatcgcaggggatgtatatgccctctttgatattgttcctaatatccagggggggagaggataatattactttccatatcacaaagagtgttcacccccctgtgatattgttcctaatatccaaaaaggaagaggatgatatcaatcccaatatcacaggaagtgtacaccccccccttttatattgtttctaatatccaggggaaatgagggtgatatttctctcaatatagcagaatgggtacactccccctgggatattattcctaatatccaggggaaaaaaagaggttgatattcttcccagtatagcagggaatgaatacaccctttgtgatattgcttctaatatcaaggggaaaagaggatgatatgactcccaatatcacaggggatgtaaacctgtggcgttgttgctaatatcaaggagggaagagtatgatattactcctaatgtcgccgaaggtgcacactttccctgtgatattgttcctaatatccaaaagggaagagaatgatattacccccagtattgcagggtgtacaccacccctgtgatattgctcctaatacccaggaaaaaagagaatgctattacccccaatatctaaggggacgtataccttccctgtgatattgtttctaatatccaagtggggagaggatggttttactctcaatattgcagggagtgtacactccccctgtgatactgtttctaatactcgggctgggagaaatagtattactcccaatatcgcagtgatattgtttccctgtgatattgtttctaatatctagtgggggagataattatattactaccccatacacaggggagggtgtacattcccctgtgatattgtttgtaatatccagggaaggagaggatgttactcccaatatcacaggggttgtacaccccttttttgatattgttcctaatatctggggggcagagaattatattactgtcaatatcacagagtgtgtacaccccctctgttatattactctttatattcagggcggtagaggatgatattactccctatatcacagggggtgttcacccctcctgtgatattgtttataatatctaaggggaaagaggatgatatcactctcaatatcaaaggaaatgtacacctttcctgtgatattgtttttattatataggggggcagaggatgatattaagaacaataccacaggggatgtacacccacgtattgatattgtccctaatatgtatggggaaagaggacagtgtaactcccgatatcgcagagtgtgtacacccccttgtgatattgtttctgatatacacggggagaaaagataatatttcttccaaaattgcagggggtgtacaaccccctgtgatattgtttttaatatccagtgggggagagaatattactcccaatattgcagggcgtgtacacaacccctgtgatattgttcctaatatccagagtaggggaggatgacattactttcaatatcgcaaggggtgtacattcccctgtgatattgctcctaatatccatgaggggagaggatgatattattcctaatatggcaggggctgtacaccttccctgtgatattgtttctaacatccagtgggggagaaaatgatattactccctatatcacagaaggtgtacactttccctgtgatattgttcctaatatccagaaggggagaggataatattactcccaatatcgcaggaagcttacaactcccctgtgatattgtttctaatatccagggaggtagggatgatattactcccaatatcgcaggggatgtacactcccccgtgacattgtttctaataaccagggggtgagaggatgatattacgcttaataccgaagggggtgtacacacccttgtgatattgtgcctaatagccagggggaagaaaattatattaattttaatatttatggggaaaaaggatgatattactcccaatatcacaggggctgtacaccgaccttttgatattgtttttaatatccagaagagaagaggataatattgctcccaatatcagaaaaggtgtaaaccccttctgtgatattggtcctaatatccagggagggagagaataatattactaccaatatcacagaaggtgcccacccccaaggtgatattgctcctaatatccaaagataatagggtgatgttactcccaatatcacaggaggtgttcacaccccttgtgatattgtttctaacgtacagggaagggagaggatgatattattcccaatatcacaggaggtgtatactcctctgtgatattgattttaatattcggggggaaaggatgatattactccctatatcgcagagggtgtacaccctctgtaatattgatcctaatatccagggcgggataggatgatattactcccaatatcgcagaaagtctacacaacccccagtaatattgtttttactatccagggggaagaggatgacattactcccaatttcacagagtgtgtacactcaccatttgatattgtttctaatatctagggggagagaatatattactcccaatatcacaggaattgtacaccacctctgtgacattcttgtgaatatccggggaaaaagagaataatattactcccaatattgcagagcgtgtacacccctccatgatatcgatactaatatttttttaaagaggatgatattactcccattgtcacaggatgtgtacaccccccttgtgaaattgttcataatattctggggggagagcataatattactccccatatcgaaaaaggtgtccaccctccttataatatggttcctaatatccaggatattacttaatccaggatacttgtaataccctaaatatacaattgcttgaacctccacctcccaggttcaagcaattcttctgcctcagcctcccgagtagctgggactacaggggcacaccaccacacccagctaatttttttttcttgtatttttagtagagatggggttttgccatattggccaggctggtctcaaactcctgaccttgtgatctgcccacctcagcctcccaaagtgctgggattataggcgtgacccaccgtgccaagccaggaagaggatgctctatagatttccccaataagagatggctttgcagggccattccaaaatatgtcaaagaaatacatttggggataaaatactttgatttcctttagggaatgttatctattatgtgatgctataccagagtcaggttggagtcggttatcttattgcaacaaagagtctgttccgtcactgttgggatctctattttttcctcttatttcttgagacagggtctcactctgtcacccagtctggagtgcagtggtgcgatcttcattcactgaaacctctgcctcctgtgttcaggtgattctcgtgcctcagccccttaagtaactaggattacaggtgtgcgccaccacacccagctaatttttgtattttcagtagagatggtattttgccctgttggccaggctggtcttgaactcctggcctcgtgtcatctgcccacctcgacctcccaaagtgctgggactgcaaatgtgagctattgtgcccagccaggatctctgttttaatgttagtgctggtcactttgcatgaactccaaagggaagaaatataatgaggtgtgtctgaccccctgccttctcatcgtgacctgaattagtttttcaggtttgcaggggatacccttggacaagaaggggctctattcggttggttggggggattagaattttactttttgtttacaatatttctcctgaaagagttaggggctcacaaggaatttccgcgtgagcaacttatgaggaaagccatctgggaagatatgtgtccttgtgtcactgggatattctcgtttaccccaatgatacggcaatgacgcagggttgtgaaattacagctatgtgtttggggaaaaaagaaagcaggattgtgtgactacgtttccaaacttcacttgcccttagccatagtgagttgggggcctggagattctgttttctttcacaatgatatagatacaattaaatgtatagaaagcaaaaaaataaaaaggtgagtaatgaggaacctctgattcctgagtggccatgtagttacccatggcacagagccacagttactgaaggtaaagtttgctggggaatttagaaatgaatccagctcttggaggagtcagtttactggatgcctaagaaaatgcaaacaaaataagaaaaaagggtaatattcaatcccatagttattgttacctgtcatagctaaagtaaaattaaaacagagtgctggcttcaatcttgatgctacactaagcttagatttcagtgaatgtgagtctcagccactagctcagagccacctcccaaagaccaaatcatgtagggacaatagaaagtacttctgagaattgtggttaccaagaacctagtaactgttggggaggagcaaaacaaagtacagaaaccagagggtacaatctgagtgagactgctatcagcttctggaggagcctttactaaaatgaatgatgagagtaactggatgatgagagtaactaatggatgatgagagtaagcaatgtctttggttttcttttttttttttttttttttttagcagacgtctcactcttgtcgcccaggctggagtgtaatggcatgatctcgcctcactgcaacctccacctcctgggttcaagcaattctcctgtctcagcctcccgagtagctgggactacaggcactcatcaccacacctggctaatttttgtatttttagtattttctggtgagggtccaggtttccggaaacaactcagagacatatgttaagatgttatctttagttttcacagggaaccaaatatgttacgactccaatttccttggctattgttttaagttaccattaccttctcgttgatcaagttgctcatttacttctcaagcctagctagatgcctggaatttcccttgaaggaagtcaagattttcctttatctccatactggctgatggtgatcgagtaagcccctaagaggggtccctgctccatctcgagatgctgctagattctacagtgcctaataaacagctctcgcctggccgacaaagagctgcttgctctctggatagcaattccaaagtgaacagacaacatcctgtttggaagactgccactctgttagaagaagcatcaggaaaacctttcttttgagctatttataactaacagcaattgaccaagtatacttttgtgagtgaaactgacctttctccctgtaagaattctccaaaatttggaaactatttgtgagtatttttacttatggcaatataattattggcacaagctcaatcagattcggttttctttcgtaacaggaaccattggagatactcattactctttgaaggcttacagtggaatgaattcaaatacgacttatttgaggaattgaagttgactttatggagctgataagaatcttcttggagaaaaaaagactgggtatattttcaatatgctttccttttaaggtccctcacctgtggaaagtaaagaatgtcactttctgacaggctcaggaacctcaagttatgtagggatctcaagaagatgggggaattcacccagttcatacaggtgaaattgctgttgcaaagattatgaatatgagagaagtccagcatggctgacttcatctcgtgtctggcctcaggctggctgcccttgctcactcttgggcataggccaagctagccatgggaggaatttagtttatagtttaactttgaagcacggatgataatagtctctccctaaaatgaaccccttccttgctcagggactgaaactacctttgtatgacaaatgaaagcccacaagattaagattatgagaggggcctgaattctgctaaaatgcaggtgtagctgactgataacaagtcattgtcccacagcttgcctttctataatctcttgcttctcaggagtcacatggccagaggtcctgagatttccagtcctgtgacccccacccagagatggacttagtgcatgaggaccattttccacacccctatgatttcatcctcaaacaatcagcagcaaccattccctagccccctgccttccaaattatccataaaaatcctagcctctgagttattagggagattgattaataatcccagtcctaccccttgggttgctctgatttaattaaaccttctctactgcaataccacggactcagtaaattggttttgtctgtgcaatgggcaagaagaacatgttgcatggttatacaggtactacaagcacagtctgatggcaaattattggttttgcttcctgcccttgatgtttctaaacatctagtccaaaattacttgtgaaaggtccagcaaagccaattttaaaagaggctatatggccaatcactattctttctacacattattgcaaataatcaggccacggctgggcacggtggctcatgcctgcaatcccagcactttgggaggctgaggcaggatcacctgaaatcaggagttcaagaccagcctaggcaacatgataaaaccctgtctctactaaaaatacaaaattagccaggcatggtggcatgcacctgtaatcccagctacttgggagactgagggaggagaatcacttgaacctgggaggcagagattgcagtgagctgagatcacaccactgcactccagcctgggcaatagagtgagactttgtctcaaataataataataataatcagaccaagtataatgaaattaaaatttattttgcaaataaattggtcctactacaatttatccttcatagaaatgtggaaactgaagataaaaaaaattaggtttcagaagaaaactatactacacctgttattagattctagccctaaacattgtttttgaggtttttattatttacctgcaatttggtctaaattctgaattatttcctgactacaagtatccaaggaataaatgggttttctttttctttatgatagttttagttggcttctaatgcaacaacaatttttattgtaatcctgtgtgcattctattcctactattcaaattattaatgttatagatctttcattgtagtacttctgaattaaccaaaatcacagtattctgaagatgattctacaaagcctgctgtttctacaaaggctgctgatgatttctacaaagcctgctgtagtgttgctgtggcctctgcttaaaaaagtagaaaacacattgatgcagcatgttcaccccaacctccctgcctaaaggctcagggaccatcttggaagaggaaggcgcgtgagattgtaagagccgaattagggggatggagtgtggagaataaggacacttcatcttggatgctcacctgccaaattgacttctgatgaaagccagctccagaaatgtgcctacagttactactttcacctaaaccctgcccttagtcaaatccttctcttcttctaagcaatcaacttcaattccttgtataacccacagtataaaagggcttttataccattctatcctattgcatgtaagccttgggtctgggaggtaacagtgtgggattccaccatctcatctccctgccacccaaacatgcctgctcttctttaagcaatattaaatgtttgtacttcagaaatttgatttgtcagcctcttcttcagactctcagcttctttggcctttgggagtaaatttgcataggcctgctcaaaacaggatgttctgggggtttgggggtgttgttttgttttgttttttgttttgtttagagacagggtctcactctgtcacccaggttggagtgcagtggtgcaatcatggcacactgcagcctcaaactcctaggctcaagcaatccccccaccttggcctcccaaagttctgggattacaagcataagccaccatgcccagccctggacttttctttaaagacatttacacagtgtaggaattactgtgggtgcactgctcaggtccccttctccaggatgctcattcctacctcatagatgattttcctgcagagatttgacctcagctgaagggcagtcacctggtccaggtggttgctattcacctccttcctgagaacagccaacagccagggacacgctagcacagagatataagagcgaccaaggtgaggccccttctgtgctgcggtgcatgctccagagcctccctgggatcagacttaagagggtctccagccagatctggtcttcgctgctttcctcgagctccccagcgcactcctgcaatgcatcttttttttttttttttttttttttgagacggagtttcactcttgttgcccaggctggaatgcaatggcgcaatctcagctcaccacaacctctgcctcgcgggttcaagtgattctccttcctcagcctcccaagtacctgggattacaggcatgcaccaccacgcccagctaattttgtatttttagtagaaacgggtttctccatgttggtcaggctggtttcgaactcctgacctcagttgatcctcctgcctcagccttccaaagtgctgggattacaggtgtgagccactgtgcctggcccaatgcacctcttgaatcacctcctcatgctttgcttttagagaacatgatccccaacatgtgattccagcaaagattctagaaagccaaccgtgacaatcacttctgggtttagatgacccccccccaccacaagatggcagtgagcacctcatcacagaggtgctgatggtctgcagcaccgcgccaggccagaacgtgccttttacagaagaaaataacccagtagctgactaggatggtgaggagggctggtgagcactgcggtagtgagagggacactagcatcactgagatgcaagtgatggtcatttttcataggtcaaagctcaaagcaggggacagttacagggcagggcttcatagcaccagtgtgatgaaagtatctgggagtggctaaggccagcactatgccatgggaagcaaggtgggcctgaggaggaggcagcagcgtcagcctgcaacaagtgggggctgccctgcagagacctaagagtcatgttatagagcacagtgtctgtaaggccaagaagtgtggacagccaagtgtgtcaattactagacatactcaagaggagcaggaagggcagggcatggtggctcatgcctgtaatcccagctacttgggagactgaggaaggagaatcgcttgaacccgggaggtgaaaattgcaatgagccgagatttcgccactgcactccagcctgtgtgatgggagcgggactccatctcaaaacaaaaaaagaaaaaggaaaaagaaaaaaagaaaaacctaggtatacttctcaagcaaataaaaataatcaaaaccaatatcatgcccgggcacaaatttcatatatataacagatttaaatatatgagggtgattatcctctcatatctccatttttttttgtttttccatttttttctttactaaaaaaagttaatgccaatgacacacaatttttttttttttttttttttttgagatggagtctcacttcttcgccctggctggagtgcaatggcgtgatctcgactcactgcaaagtctgcctcctgggttcaagcaattctcctgcctcagcctcccaagtagctgggaccacaggagtgagccaccacacccagctaatttttgtatttttaatagagacggggtttcaccatattggccaggctggtctcaaactcctgatctcaaataatctgcccgcctcggcctcccaagattctgggattataggcgttgagccactgcgccccgcctatgtatgattttttttttaattttattttcataagtttttggggaacaggtggtattttgttacatgagtaatttctttagttgtgatttgtgagattttggttcacccatcaactgagaagtatacactgaacccaatttgtggtcttttatccctcacccccttcccaccctttcccccggagtccctgaagtccattgtatcattcttatgcctttgcatcttcatagcttagctcttgaacccttactttctgtttgagggagaagacatatcatctacaagtagatactgtgtaaacattccattgcatgactatcccataacttatttattatttgtgtttggttatttgctgctatgtaacaaccccactcccaactaaatggtgtgacaattccatgattctgtggatcaaaaattctgaaaagtcaaacccaaggagttttgtctctgctccatgatgctaaagcctccgcaggggtgaggcgaatggctcagggtgactgaaaagctcagggttggaacagctggggatgaggcctctatgtataagatgattcttcactcacaggtctgaaactatggtggggacagccagaaggctcggctcagctgggacagtcacctgagccctacacatgacctctccaacatggtgatcctgaagcagttgggtttcttacacagcatcacacttttcttttttttttttttttttgagatgaaatattgctctatcacccaggctggagtgcagtggcacgatctcagctcactgcagcctccgcctaccaggttcaagcgattctcctgctccagcctcccaagttgctgggattgcaggcgcctgccaccaagcccagctaatttttgtatttttagtagagacggggtttcaccttgttggccaggctagtcttgacctcttgacctcaggcgatccgcctgcctcggcctcccaaagtgctgggattacaggcatgagccaccgcgcccggccaaagctcacacttcttatgattcagccttagatgtcacatcagttcattttccccacacttattagtgttagaagtcacaagcccacccatactcaggggactggcacacagaccccactctcaatggaaggggtgggacaccaccattcctgctgatgggcatttgggtaacttcctgtttgaagctattaagattgggctgctgtggccgggcgcagtggctcacgcctctaatcccagcactttgggaggccgaggcgggcggatcacgaagtcaggagatcgagaccatcctggctaacacggtgaaaccccgtctttactaaaaataccaaaaaaaaaaaaaattagctgggcatggtagcgggcgcctgtagtcccagctactcgggaggctgaggcaggagaacggcgtgaacccgggaggcggagcttgcagtgagccgagattgtgccactgcactccagcctaggcgacagagcaagactccgtctccaaaaaaaaaaaaaaagattgggctgctgtgactattctagtaggtgtctttggtgagcgcctacacgtgtttctctttttctctttagtatatgcccaggaggggaactgctggctcccagataccgtatgttcagggtcacacacacttccacagggttttccaaagcccttgtaccagcacgcactcccagcacctgtgtgactgctccagctgtcccacagtctcatcagttctattgctgatattttcattttagcttaagttatatttaataggaaaattaccgttgcctctgccccccgttcctgcctgtaggagtttctcgtagctgttgctacaggtggccacaaatctgtcacttaaacccacacaaattgatgtccttatggctttggagtcagaagtgtcaactgaaggtactagcagggctgtactgacctggtggcctcagggagcatctgtgctgcttctccaccttctagaggctgctgcatccctcgctccagccccttcctgacaccactcaccctcctacttctgttatcacatcctcaccttctctgtgttcagggctccctctgtctctctcttgcaagcacacttgggattccattgagggccacccacataacccaggagaatttctccacctcaatatccttaacaactgcagagcccttttgccataaaagttaccattcacgggttccagggattgtgacatgggtagctttaggagtgattattcctgcctgtctcccgctcaccagaacttggactttctctctcaacaggagccccctgtgtgggaatagcctgtctcaacgacgccctctataaggacctgcttcctcaaaggacctcatagtcgggtcctgcccctcagtgtccagtctgccttggctggaggggctgcaggggtgtgttggcgccacctggtggagacagggcatcacagcaggtgggagcccagtagaagcacaaccaaaacatgggtaatgtttaaaattttctggctaagcgctgtggctcacgcctgtaattccagcactttgggaggccgaggtgggtggatcacatgaggacgggagtttgagaccagcctggccaacatggtgaaacatcccctctactaaaaaatacagaaaaattagctggacatgtggcgcgctcctgtaatcccagctactcgagaggctgagacacgagaatcgcttcaaccccggaggggttgccgagatcgcgccactgcactccaggctgggcgatagagcgagactctgtctcaaaaaaaaaaaaagaagaggggaggcgaggggaggggaggggaaaagggggaatttgtttggagctgagacatccatcttctcctgacctcagatatttgcactcctggttatgaagccttcacacttggactgaatacaccaccagctttcccgatttccagcgtgcaaatggcagatcgtgagacttctcagcttccataattacatgagccaatttatatatataaattgggtcctccagaaaaacagaataaattatatatataattatacgcataacttaattaaattatacgtataacttagctatatatataatttattctgtttttctgaagaaccctactgacacaaatgttgagcatcttttcatgtgcttattggcttaataacttgtacatcttctttggggaaatgtctattcaagttctttgcccattttgtaactgaactattaatatttgtctttacattgttgagttgtaaaagttccttatatattctagatactagagccttatcagatatatttctgcaactattttctcctaatatataggttgtgtttttattttctttttctttttttttttattgagacagtctcactctgtcacccaggctggagtgcagtggcatgatcttggctcactgcagactcgacctgccaggctcaagcaattctcccacttcagcctcctgagtagctgaggttataggcacttgccatcgcacccagctaatttttgtattttttagtagagccgaggtttcgccatgttgcctaggttggtcttgaactccctgcctcaaagcgatctgtcagcctcagtctccctaagtgctggaagtacaggtgtgagccacagtgcccggccatctattttcaatagtgttttttgatgtacacaggtttggaattttgataatgttcaattcatccatttttttttttttttttttggttctttctactggaccaccactcttgagccctctaatccaacctccacgcggcagccagagggagctctctaaatgtaattactctttccctgctccacctgctcaaaacagtgtcacatttgtgatttaaaacagtatttctcaaacctaatttgcaaacaaagcaggtggaactcttcttgtatgcacagcatctgatttggttggtctggcatgggtctgggagtgagcacacctaccaagcggctgctggggtaacttgcgttttccactgatgatttcagcaatgtttccggtcccacatgctcctccagaaccttgtactcccccatgaaaaggtggagtccatttccccttcctttatttatttttttgagacgaagtttcactcttgttgcccaggctggagcgcaatggcgtgatctcagctcaccgcaacctccgcctcctgggttcaagcaatgcttctacctcagcctcccgagtagctgggattacaggtatgtgccaccacgcccagctaattttgtatttttagtagagacggggtttctccatgtcggccaggctggtctcaaactcccgacctcaggtgatccgcccgcctcagcctcccaaagtgctgggattacaggcgggagccaccgcgcccggctatttccccttcctttgaacctgatcaggacttgacgatggcatcaacatggtgagagtgaccctgcatggcttatgaggctgggttacacaaggcgatgttgcttctgactggctccctctcaggatacatgcccttggaacccatcctctaagctccttgggagcccaacttagcccatgtggagacaagacagggagagaaacagaggcacccccagccctcagccagcatcaaccgccagacaggagagcaaatgcgccaacaatgattccagctgaagcctcagacagcgtggagcagagatgagggatccctgcagattgcagatgcgtgagcaaaatgcatgctgtcactgttttgaaacaacaatgtctgggggctgtttgttatgcagcaatagacagctgtaacaatgctgttactgctgtattccatgaatgactgcactttgagtagcagggggctagatcactagataagccccatggcttctgtgtatgctatttttctacttttatatccttttcattcactttttttttttttttttttgagacagagtctcactctgttgcccaggtgggagtgcagtggtgcaatcttggcggactgcaacctccacttcccgggttcaagcaattattgtgcctcagcctcctgagtagctgcgactatagatgcacccccatgcctggctagtttccgtatttttagtagagacggggttttgccatgttggccaggctgatctcagactcctgacctcaggtgatccacccaccttggcctcccaaagtgctgggattacaggcgtgaaccactgcacccagcctcattcactttctttacttggctcatttttccttgttgcctcaattctcctctaagatcactttcctgacatttcagcctgggcctgttgccttctctgggtcccctccgcctcctgtgcctcccccatctcagccttgatccctcagattatacttcctctgtccccaccctgaccatcttggctgtccctggatagggatgggtatcttctcccactggtctgggagatctggaaggacaggcctggaaaagacttggtcactgctggaaggagctcagttagtgtggtgctgaggacagtacgggtgaggctggccccttcacccaaactcccactctcttccatagatttcacctctgtggcccaggccataggattagggcaactccccttaaacatcgagtccatcctccaagctgtccttttttttttttttttttttttttttgagacagagtctcgctctgttgcccaggctggagtgcagtggcgcgatctcggctcactgcaagctccacctccagggttcactccattctcctgcctcagcctcccgagtagctgggactacaggagcctgccaccacacccggctaattttttgtatttttagttgagacggggtttcaccgtgttagtcaggatggtctcgatctcctgacctcgtgatccgcccgcctcggcctcccaaagtgctgggattacaggcgtgagccatcgcgcccggcctcatgctgttcttgaatagtgagcacctgttacaagtcgccccaccagcctctcacttgtacccccctcatctctttctccccaagagacagaggaccctggcacttgtgaagcatgacccagaccctggggccatggcatccaacatcctcattccccatgacccctactgtctagatgtagctgccaagagacccccagactccccgggcctctgtctagagtgccaagacagagagagaatgccctgccgcttgcatgctttgtggggtgtccttcccccttccctggctgctaggcgtgacttcaacgttctccccaacccccaaacagcagcactgacaccagctgcagacctggctcaggttagctaatgaggaccaggctggggatggagcctgaacccctaaaccccagtcctgtaccccaccctaatcctggggtctccactggacaaaacgaagcagcttggtttttcgttgttattgtttttgagatagagtatctctctgtctcccaggttggagtgcagtggcgtgatctcagctcactgcagcctccgcctcccgggttcaagtgattcttgtgccgcagcctccccagtagctgggattacaggcgcgtgccaccacacccagctaatttttgtatttttagtagagacagggtttcaccatgttggccaggctggtctgaaactcctgacctcaagtgatttcccagcctcggcctcccaaagtggaagcggcttatttttaaggagaaaactcccgtggaaaggaatcagcacctcctctgtcaacatttcacttctctgaaaagactctcacttccaacagaaagtgctttgtaacacaacaatgaggctgggcgaggtggctcatgcctgtaatcccagcactttgggaagctgaggcgagtggatcacgaggtcagaagttcgagaccagcctgaccaatatggtgaaaccccgtctctactaaaaatacaaaaattagttccgtgtggtggcgtgagcctgtaatcccagctactcaggaggctgaggcaggagaatggcttgaacccaggagatggaggttgcaatgagccgagatcacgccactgcactccagcctgggcaacagagtgagactccgtctcaaaaaaaaaaaaaaaagaatgagaacatatggacacagggaggggaacaatacacacaaacaaaatttagaaacaggtgaaaataattttagtaatatttttactaatactgatatgctcaaaatattattatttcaataagtaatctaaaaattattgagatgtcttatgttcttttcatcatactaagcctttaatatttggtgtgtattttacactcacagcacatctcaatttgcagtccccatgtttcaagcactaaataaccatgtgtgtccggtggctaccatactggacagcgttgatctgaaatcgcatctgtatgcatcaccagcatatttgcagagatccccatctcagcagcacacctgaggctcatctgcgaaagcacctgcaacttctctacaacctcccacatcacctccaaacacatcctcatgtcatctgcaaacacacccatagctcacaggccaatgcctaaatatcattgcaggcaccttcagagaaagcacttactaaaggggtatacttgattccacatctgctttgacctgcaaatctcccttctcctttacatacatttgcatctcatttgtatgtcaatctaaatccactggcagagcctcagatcatcatctcaaagtcaggtggatgtggggctgggcaggcctccaggtgttcctcctcctgcttcctctggggctcttgatcctcctcctcttccttgctgctctcctcctcctcctccaatatggtgaccagttcctcccgcagcgcccccatctccagccccaggctgcacagctgtcccagcagctggacatccactcggcgcaggttcccctgccagtaggaaggggacgtcacagggatgccaccccagagagcaaggggtctctccaggacctgggtgagagcaggtcccaactcatgtcctggccacagcgcctgggcagggtcctcactgtgcccatggaccctaactgccttcctgcttctcagagtgtctcttgatctctaactcttctctttgtctctccatttcattgtccctgacttctctctctctgtctcctccctctcttatctatatctgtccctgtttccctttgtctctgtccccatttattttttgtctttccatgcccctgtctctctgtctttatgtgttgccatttctctgcccctgcctttggctctctttctctcgcttgccctctctctgccctccccaactttctcaaattcagtctgtctctccatctctgttcctgctctccgtctctgcttcccacctctgtccctctcttttgggatctccctgtccccacctctgttcccgtccctcactctatgtctgtctctcggtgtctgtacatgcctctcatgtctctgcttctatctctcagattctgtttttcgatctctggccttctctatttttgttcatttccattcattctcatttcctctctttctctttcccttccaaacccctcactcaccagctcctccctgatccacagcagactatcgcaggcacctccagtgtctgcccctgcagtcctgagggtctgaccagggatttccactggggagacctccctcagggcctgggggggtgggcccagccccggaggcaccagtccagcctgattcagctgcctccacagttccatcgtctctgagctatggctgcaaggagcaggaagtagcaaggtccagggtggcctggtcccctggggagctgtgtgcgtggtggagagtaaagggcagagggagtgggatgggggttcctgggaaaggtatcccaaagtccactcttcagagagaatcagctggccttgtgcttttctttttccttctgaagtctaacctcaactctgctcacagggttcaaacatagcctcttgcagaggtctaactccacccttccctgcctgtctcaggcctgacccctcaggggcgctcagtgtctgtagatgcctggcaccctctgtccttccacctgccccccaccaccacttctccagcctctcctcagcctccatttgacctctggcttgcccatagcttggtccttgcttgtcctcttggcacgggtcatcctagggctttcccaccagtgtgcctttgggggcaggaatggctcccaggggcaccaagacagcaatcccttagctggagtgcctgtgtccaggctgctggcctagggccaagcagccaattctgctgaccctggacttgcctatgggtatattatccctgttgagggtgagggcttctgctgtggaaaagtctgggaagcactgcaggcctctctcggccttggacccttccttcagacccaaggtgcatatatatacatatatataatggtagatcacgaggtcaggagatcaagaccatcctggccacatggtgaaaccccgtctctagtaaaacacaaaaaattagccgggcatgctgccgcgtgcctgtagtcccagctactcgggaggctgaggcaggagaatggtgtgaacccaggaggtggaggttgcagtaagccaagatcacgccactgcattccagcctggcgacagagcaagactccatcttaaaataaacaaatgaacaatatatatatatatgtattttgttttttgagacagagtctcgctctgtcatccaggctggactgcagtggtgcaatcttggctcactgcaacctccgcctcccgggttcaagcgattcccctgcctcagcctcctgaacagctggggttacaggtgcacgccaccacacctggcgaatttttgtatgtttagtggagacggggtttcaccatgttagccaggctggtctcaaacccctgacctcaggtgatctgcccacctcggcctcccaaagtgctgggattacaggcgtgagccaacgcgcccagccccaagtcccttttaccatagaaagtaacatagtcacagtgcccagggattcacaggtatggggagagggttcgttattcagctgccacacccaccttcctaaacctgctgcccttccagtttcctcacgtgcacagccacgcccgtctgcttttagtttctcaatctgttggcttaaccttcaaaacaggcccaggatttgagcacttctcaccattccctctgccccatccccattcatctcttgcctagactgctacagcagcctcttttactggtcccctgcatccacccttgccctctaaggcaagggtccccagtccctgggccaaggaccagtaccagcccctcgcctgctaggaactgggccgcacagcaagagatgagcagcgggtaagtgagcattaccgcctgagctccgcctcctgtcacatcagcagtggcattagattctcataggaggcaaaccctattgtgaactgtgcgtgcgggggatctaggttgcctgctccttatgagaatctaatgcctgatgatctcaggtggaacagtttcatcccaaaaccatccccaccccacccccgacccccagtctatggaaaaattgtcctccacgaaaccagtccctggtaacaaaacggttagggaccgctgctctaaggtacattctccacctggcagaaataatctttacaaaatgtaaatccgattttgacactcccttcttcccactgtgaatagaataaaaccctaccaggcctgcaccgtcagcccctgcccacctctcaacccagtctcctatctctgtctgcaagctggttcccacctcaaggcctctctgctctagaggctacctctccctgcagcgcttttcccctagatctttgaatggctctttccttatcattcacttctacttcaatgtcacctcttcagagaggcctttgctgatggccctacacccagtcacttttttttatctgcttctcatcaaaattgccttgctgattcctttgtttcttattcatcctctcccacatccatcctctcccagcccagaatgttgacttcctgagagagggactgggtctgtcctgctcaccatggtaacctcggcatctagaacagtgcctgccatcacgtggtaggtgctcagtaaatattcttggaactaatgaatgaataattctatccacaagacttcacaatggctcttcatgctgcgatctagctttcaactccaaactggtcttgagatctcacctcagtctctaaccttgacatctaacctcttcacccactctcttacctgaccctaatttttaaaaatgacgtggtcagcttttcagccccctcattccctgtttttaggaggtagtgagtggaagctggaagaataagaaagcttggggagactgcaattgcagtcaggaaagaaaggtactctgccgggaagaacaccccatcttctcctagggaaagattgtggagtcctggggtttgttttgtttttcaattttttgttttaagagacagcgtctcgctctgtcacccaggctggagtgcagtggcgcaatcacagctcactgcaacttcgacctccccggctcaagtgatccccccgcctcagcctcgtgagtagctgggaccacaggcgtgcaccaccacgcccggctaacattttattttttgtggatataaggttgccctatttctttgtggagataaaggctcccctatgttgcccaggctggtctcgaactcctggcttcaagcgatgctttcgcctcggcctccacaaagtgctgggttcacaggtgcgtgagcccgacctgtgtctcgttttgaagctcagggagagggcgctgtgagcaatccctaaaccctttaagagtaaaaagtgcgtgcacctttaagaggacggttagaaaacgcggggcgtggccacaggagaataagttcgcgctgaaccaggagcgtgggataagaccggccccttccggttacgaaaccttagcaagatggcggctccctgggcgtccctgcgcctggtcgcccccatgtggaatgggcgtatcaggggcatccatcgcctgggtgcggcagtggccccagagggcaatcagaagaagaaaaggacaatactccagttcctgaccaactatttctacgatgtggaggctctgagggattacttgctccaaagggagatgtacaaggtgcatgagaaaaatcggtttcgagacaaggagtggatcaggccagataagtatggccatttctctcaggagttctggaatttctgtgaagtgcctgtcgaagctgtggatgccggtgactgtgacatcaactacgagggcctggataacctcctccgcctgaaggagctccagtccttgtcgctgcagcgctgctgccacgtggacgactggtgtctcagccgcctctacccactggccgactcgttgcaggagctctcgctggccggttgcccccgcatctccgaacggggcctcgcctgcctccaccacctccagaacctccgcaggctggacatctcggacctccctgccgtgtccaaccctggcctcactcagatattggtggaggagatgctgcccaattgcgaggttgtgggagtcgactgggctgagggcctgaagtcagggccggaggagcagcctcgggacacagccagccctgtccctgcctagcctttagccctgtccccactcacgtggcttctcagcgggctgcatggaatgtctggtagctcaccacacttctggcttccatttgtcttcactcaacgtcagggtgggggagtggtgctggccaatcacaggagagagcgtgagttcccagtatttattcctggctgcccttggctaaaggtcacagctcctgtcaccctgtcaggcagccctttccatgcccctgttcaggcctggggaggtaaaggctcaggctgttagtagccgcagagagccacactcaccttgtcaggagactcttctcaaactgtccttatgtgagtgcactgccatttcttgcagggaccctgactgacacaggggctactactgacactttacagggatggttctcccccgtgcagggccgctgtgcccactgcaggacatgcagcatccttcgccccactccactcactaaaggccagcgcaccccaggccccatagtattgctggttatggatttattgactttatgttccaaattcagctttttcagttggctgttttttgaaaggggataagctttgtcagtagagggcaccgaacaggcattataggaggaaaggcgcctccttcgtggttcttgttggttgtgcttctgcctctggacgccgcagtgcatgtggcttccccagcacccagctcctgaagcaccaggcggtcagcagctgcccttggcaccctccagccctcagaagttgcgtaggagacacagcgcctccactgaggcacctctctgggaataacgttccccagcaccccaaatggatttccagtcaattcagaagcattttaccagtgaagccctcattattccagttcactgttaaagccagtaattctctatattaaactttccctgttcggtttatactccggagtataaaccgaacaggattatattatctgaagctccccttttgggcggaatgtg

SEQ ID NO: 735321 - DNA, 188346 bp, Homo sapiens
ctccaaggctgagggatgaggagacctgctgaggacccagggccttatctttccatcccactccataggtcccagtattgactgatgctgtcttcacctcctagcctcacttttaaccttctggcacccgcccaccactgtccagttcactattgaagccctgccgtccagtgctgcagagggaaaggatgttcttctactggcctgcaatatttcagaaactattcaagcctattattggcacaaggggaaaacggcagaagggagccctctcattgctggttatataacagacattcaagcaaatatcccaggggccgcatacagtggtcgagagacagtataccccaatggatccctgctgttccaaaacatcaccctggaggacgcaggatcctacaccctacgaaccataaatgccagttacgactctgaccaagcaactggccagctccacgtacaccgtgagtgattcccccatacctctgggtgctggcggtcagttctgcttcacacacatgagattgtcaggcctgggctgtgcctgcatccccctctgcattttgtcccgtgttgagatttgggcatttagtgcaggacacacacatggtaggtaaacttcaacagatcagaattcctttcctgcatccaggccctgcagacactgatggcgggggcgggggggcctcagcagggggaggtcagtctcagccaagcaccccatgccctccccatgaacctgaccctgagaaagaccctggagaactgggtcagggcctggcctgagggcgtcctgggaacctcacaaaagcccagcctcaggactcctgactccgtgtgaccccgggaagcctgtgtcagggctggggtgtggtctcctgggcagggcttactgggagcaaggatttaccagatgtctgcgggctgtggttcctgaagcttctcatcagtgagggctcagctcccagagtctcatctagacaaggacagagcctaccactttccctgggactcagcctggagagggcagggggacaggattactagggcattggccccctgaatgaggagcttaagagatgcccttgggcagtcagtggcccaggggtaggaacagaggggagaaaatgttcctggcagcttcttgtccaccggggatcatgcccaggggtgctctcccatggaggcaaataacagatgctgttgatgtgaacacctcctctgtgccaagcttcatgtcagatcctgtgaataatttaaagttcattcacagacaaagtggcaagcctcagaccattttccatttacatattgtatggaggggaaactgaggcacagagagatacagacaccggccacggtgggcagatcgcagctggcagagtcacatgagggctgtctgcagctgctgccacgtcctctccttcatccctggtgccttactaggtgtctgtggaccttagaacagccactggttcggatgttttcttcttaggtgtctacagctcggagggggagattctggtctggagagttatgagtaaatacagaattaatcagttttttcttaactaaatcacctgcctcaacaatcagtcagtgctggggaagttcaggcctcctcgctcaggtccacaccccgcatctctggacatgaaatggcttcgtgtgttttctgatgtgtgggtatcattccaacaggaggataaaggggaggactttgctttctctccccattcacaccctgcaccagccagggcccagtgtgagacacatactccgtagttctctcatgaaggagggagggaatgaatgaaggaatgatctataacctcttcagagacagagacctggatacaagatcctaggaggttctgggcccaacgtgagacacacactctgtagttctcttatgaaggagggagggattgaatgtaggaatgatctataacctcttcagagacagagatgtggatacaagatcctaggaggttctggccacacctgttttctgtccctctagagcctaagacccatgtctcattcatctggcccgtttctcctaaatctgcccctgggagctgagtctcatctgaccctggggctgcagggctgtgggaaggttttcaggggagggatcaggcttgcgggtagtcccacacgtttgccttacaccctggagctctacctggttctcactatgaatatcccataataatcccccctatcctttctggggagtagaaaaaaagtaaatatttaaaaatatgccagagcatctgttcttcttagcaagttcagatagttattagttagcaggaataaatcgttattttaccagagcctcacctgctgggggtttatgggagcctaactgactgaggggggtgggaaatatccaactccagccccctctagccatcatgtcccacctaaaggagagaaaaaactgagaggcacttgtgacattcacagcccagggcacagactctatccaggaccacagaacccctccctccccccactcaccaccgcatcactgaacgcctgctcacccaagttcctgttgcccagtacatcatgtcctggctttcaacaaaaactacaagacagactagaggcaaaaaaaaaaaaaaaaaaaatgcagttcgaaagacagaacaagcatcagaaccagatgcagatgtggcagggatgtggcagggatgttgaaattatcagaccaggaatttaaaacaactctggggccaggagcggtggctcatgcctgtaatcccagcatttgggaggccgaggcaggcagatcacctgaggtcaggagttcgataccagcctggccaacatggcaaaaccccgtctctactaaaaatacaaaaaattaggcaggcatggtggtgggtgcctgtaatcctagatactcggaaggctgaggcaggagaattgcttgaacctgtgaagcggaggttgcggtgagcctagattgtgccactgcactccagcctgggcaacagagcgagattccatctctaaaacaaacaaacaaaaaacaatactggctaatatgctaaaggctgcaatggaaagcatagacaatgtgcagaacagacggatgctgtgagcagagagatggacaggctaagaaagaataacaacagctactatatctatctatctatctatctatctatctatctatctatctatctatctatatatatgtatatatatgctagagatcaaactcactgtaacacctggatctcagagtggttgtgaggatgtttattaggagattaaagagattaaagcagagttatacacagggcgagagctcaactgatgctatcaactagtattcttatttttttgatgttgttattggcaataaaatcaggaacaatgcagtaaaaatttggttttatcatgtacgagttctgtgaccttccttgacttactgaggtactgtaagtctcagattctaactctgcagatggcggtgatgcccctctccctcaaggtgatgtgaggatgagatgagctgtaggtaggttggtgcccactgtgcctggcacatggaaggcccctgaaaatagtcaatgaacatcatccccgctcatcagcatggagttgacagtgagggctcgctctctgtgacaatcatggaatggaaaagaagaaacaagaggaagactgggcgcagtggctcatgcctgtaatcccagcactttgggaggccgaggcgggcagatcatctgaggtcaggagttcaagaccagcctggacaacatggcgaaatttcatctctactaaaaatataaaaattagcctggcatggtggcacaaacctgtaatcccagctacttgggaggctgaggcaagagaatcgcttgaacttgggagatggaggttgcagtgagccgagattgcgtcagtgcactccagtctgggtgacagagcaagactccatccaaaaaaaaaagaaaaagaaaaaagcaacagagggaagaggtgtgacatgagaggaagaagggatttaaaggtacaggagcagggcgaggtgcaagcacctgtgggagaatgtaggagttggtacatcccagtgtgtcaagtctgagacacagaaaatggtgcaaccgtggagagcaagggagtcagctatgaggacagcccaacagaccacactcaggctctggagcatttccttcctccctgactatgcccctgccctgcaatgccccttatggtttcccttggaacaaacttgggccttgtcccctttgccttcccctttctgcagaaaacaacgtcccaggccttcctgtgggggccgtcgctggcatcgtgactggggtcctggttggggtggctctggtggccgccctggtgtgttttctgcttctctccaggactggaaggtaccgcagcttttccccagcctcctcccacccctaggctgaccccagtcagggaggagggagaccccgccctgtattcagggccaggctttccgcatcctcccaaggaatccttccctctcattccatggctcctcccttgccagctgctgatcctaggctgcctcttcctttatgaatgtggcacagttaaggttgcacccctgagtgctgtcctagttccctaacacagcaaagccacagctgcctggagggaggaagggagggagggagggagggagataagacgggagtgctcagaacctggtaccttctgctgttcattgaatttacccacccagtgaggagggatttgcaggcttgagatccatggtgggggtcctgggcatggtcacgcagtggggagtggcaaagcctggacaggctgggtagggtcagcaccccatcgtgattgatgtccctgaggtgtgagatgggagaacctggacctcaggacctgctgtcctttatgtctcttgccaaggggtggagagagagaggacaaggccattgccccatttcagcatctccaggcctgaaaggagggtctggccatggcagggatactgagttctgggagaatatgatacatgctccttgcctccccatgcccccagctcccccagtgtcctgcacacacagccggccctgctttccctctggggccttgacccttcctctcaggcaaacgcaggtggtctgattccctccctgagtcctcagtccctttcctgggtccctgggtcaatgttctcctcacccggcatctgcctgggggggtccttcctctctggccaggacagacgtgactgcttaaggcctatcctcagctccccgtcctcggccgctcctaccacgaaactgatggagacaggaggccttcactccagtccttgaaaatggagtcccttccttgtcctttattctgcccctaaacctgtgatttctccctgcaccctcatgaataatcctgacctttcctagggccagcatccagcgtgacctcagggagcagccgcccccagcctccacccctggtgagtgtcccttcagcccaggtgtgggagcccctaggcctgccctacggtgtccactcctgccagtcaccccctgggggcctctgaccctttctttggggctgcaaggaggatgtcaggaaacatgacacaggggaccccgactgtcttgttcagactgatctgtgggctctgggtcgtgggtcacctcctcgacctcagctgctcaggtctcccctgggaagaggctccctctccctgattctctgggagctgaggacccctacactctcctgcaggaggggcccaggctctcctcccaccctgctgctcactcctgtctctgtccccaggccatggtccctctcacagatccaccttctcggtaagcctgttccctccccagcccttttctactggggtcccaacagtgcaggctcagggcagggggaccatcaaccccacagcacagcactgacccacctttccccagaacagtcaggtcaaagtgagtgcctccagccaggatccgggcctctctacagggccaggaccacccacgccatgtgctgacccctccccgggaccctctacacctgaggagaaccctggagtccagcaggtgcagaatggacactgggaccatcagtcagaggcccacattaacaagggtgcggggtgggcccagccaggacaggggtcagggtgttgtgtccacactgggaggctgagctcaggggcagagctggtcaatcctgaggggaaatgagtggaagtggaggcagggaagtaagtcctggccgatcagagacaggaaccttccaggctgggcttccgtgaccctccctccctgtcccctgacatctcctctctcccctgcccaggcccctctacccagccccagaacagccactcccatctatgaggtgagtgtgggccatggatgttctggtcccgcaggctccaggggacccaggatctgcccccaccagcacctggctgagctcagattcaggaaaatgcagtgaaaatgagaacaggtggtggtgagcagaggagggaggggcctgggaacagggaccccctgagcacagccaggttcagccccagagaagccctgggtgggcccagagcctgggagatgccagacactgttctgagaaggctacaggggttgaggcctcttctctgtttttacaggaattgctatactctgatgcaaacatttactgccagatcgaccacaaagcagatgtggtctcttaggttcctctgggagctgctcttgtgggttgatggagcgtccccaaagctcccagccctggggacggggaaggacatggagcctgagccagagaaccagctctgagtcctgaggagacacaggcctggggacagggagggatgggagtccctgctgaatatctggagaccctgacaggttgccctgggctctgggtgggccgggacaaaggcctctcatcaccacaggaagcgggggcttgcaaggaaagtgaatgggcctgtggcccacccggggtcaccaggaaaggatctgaataaagaggacccttcctctcattggctctttttctgctcacgggaacttagcagaaactcacctgaaactccgtgtccattctctcccgggtcacacagggaaaatatctccaccttgtctcaaccacagtctctcttccctgggaggcagaaataggggttgggagtcaggctggggtgggccctacacaggaaagggcaagattcacatgagccctgcccagccagccgagcgctcagctgtcctcacactaccccagggaccaaggccatgcacagccccagcctgggtccctctgtgaatgcatgtggggtctcaggagcacagaagatggggccatctgatgtccacaaaaggtgagcaatgcgggagcaaccatgggtggtataggttgcggctgtggcccctacgcagcctccagtgtcctgacccctgctgccctcttcacccaggccctggaggcccagtctatcactgtcctccacaaatgaacttacctgtccccaaatccaggatcctgtgtgcttatacctggccactaggttctcctctgtcccagtggctactgctcaggacatctttatccctggtggggcacagagaggggctgtcagagcaaccaagattaatacagacgcataattcagtccttgagcactacccaggactctggcccctcattgctcatcagttcccactttaccccctggcatggatctcactgagcaagccaactctttacacaggagcatccaggtcagaggtgcaggactcccccatctaaagctcatgcaggctcccatggcgatgggacaacctgtctgctcctctccctggcccacagccctatctcgcctgcagctcctccacacacctgggacagcagttctcagcccttccctgagggcccctggaagggtgatgatctcatataggttcacttgaaccaggtgccaccttcccacaagtgagctggtgcctgcactaaagcacagagccacagttcccaagagtgttctgccactgccacaggtcccaagagtgttctgccactgccacaggttgttcgtcctgagatgagaggtaagaaaacaacccgcaatgggttgttttatatcgggatttgcatcaggatttagctctaaatgacccctgatcccacctgcacacagcgtcagatgagacaaggtgaggcctctttagttttctgttgaggctgtgacaaattaccacaagcttagtgacatagaaacctgaaccaaagtgcccacatggctgtgttctttctagaggctccagggaagagtgcatttcctctccttttccacctcctagaggcctcctgcaaccttggctgtgtcctctttctccatcttcaaagccagcagcacagcatcttgaaactattctgtgccctgcttccatccccacatctccacctcctcccacctccctctctcacttaaaaggaaggagccttgtggttattttggacgcacctgggataaaccacaacaacctccccatctcatgatccttcctttaatctgtaaagtgtcctttaccacgtgacatgtccacagatctggggatgaggatgtacacatctttgagaggcccttgttctgtccatcactcctctcaaggccatcttctcatcatcgttcactacaaactacacatgggcacctggatgggttcatcatgactgtggcgtcagttcctgcattaacatccccagcaccctccagatcctgagagagggagacggagggctctccatgcccctagtacctctccaccttcttcttggtgacatgcttagttgctaagaataacagaaagcggaggtgactgaaagatcacaactcaccggcccttcaatagttcgtggacatcagcaccacggacagtgactcagtgaggctaatttccaggtggcagcagggagcatgcagataggagggaactgcaggaaaagctgcccattctattctatatgagaaagagtgtaagaaagaggaagctattacagggataatgctattcttctctaatccataaattgcgaaacctttgcatgtctggatatcatggtttttagcacatctgctgccactccctgcagggctgattgctgcatccaggatgtggtctcttggggggctcacagcctgctttggcctcatggtgagtctccctgcccctgacactcaggccactgtctctgcctacaacatggtgggaaccttccatgattaacgtctgattctctgtgcctgacctttgaagcacatccatcactcagcctggagcatccgctgagctcagcatcctgctcctccatccccagctgagcccttgaggagatgcttgagaggatctcctgggctcctctgtgagctcctccaggctgagccttgtgcttggtgtcagaggcctttgccatctgcttgttctttccataggcaaataatcctcctcagggacaagtggggcctgaagatctgtctgaatatctatctatctatctatctatctatctatctatctatctatctatcatctatctatatgtatgtatatatgagaatgctttattaggcaaaactgcatactatgaacatgctttaaaatgcaacaggatgagatgtgaagacataaagaacaagtgtgtagtgacacatggctatcagaacacactgaagaatccacaccgcggccgagagcagtggctcacgcctgtagtcccagcacttttggaggctgaggcaggcagatcacttgaggacaggtgttcgagaccagcctgaccaacatggtgaaaccccatctctactaaaaatacaaaaaatttagccgggcctggtggctcatgcctgtagtcctggctgttcgggaggctgaggcaggagaattgcctgaacctgggagacacaagttgcagtgagctgagatcgcaccactgcactccagcctgggagatagagtgaggctccatctaaaaacaaaacaaaacaaaaagaatccacactgcttccccgcttcactttacccagaaaaggaatgttctaggccacttcctcttcagcacacatccccagggaactaaaataggttcacagtcacccccatcttcctcattcccatcacctcttacccacagaggcatctctggtcctacagatccagccctgccttcaagaggcacaggtccaacccatccagtgtccctgctagtcacacacagcactcagggtacaatggagggcttctgtgctttggatgggaacaaaccccacctcacattcccacacctgagaagccaccagggtcctctctgtcctgtcctcacactcaatgtctgtcctgggtcacccttgtcatctctcctggaaataggcatggctcctgacaggtaggattgaggctttgtcttttcaggagtccctcccactctgagcacatgaaactgctcagctccatgcaaccctctctcaccaggggccttgttctctgggtccctgaatacctgggtccatgccatgtacattttaagaaaaatgacagtgactctcaccctgacatcctcacccaaggcacgtgtctgacaagaatcaccaggtgagatacctgtggctccacacacctgaggcttcactgcgcaggggtgtcctcatccctctcctcccacccctagggacagtaagcaccacaggctgccttggaccaccagctccccctcccagacacagcctcagatctatactgacatgctacatggagaggctctgatgaacagcaggtattaggaaatcccaccgaaccaggtgccacttgcggccccactcctcctcatatctgtgactgggacagacacacataacacacctctgttcaccgcccagcccccaaggtcaatcacagtctgcttctcccctagatccactgctccccatgtcttccgtcctcagctgcatcctgggtggcctccttgctgttcttgtaccccagaggcaggttccaacctttgtgatgttgcctgcaatgcccaaactttcccttccccttccccttcccttttcccctcccccttcccctccccttcccctccccacccctatcccttcgtcttcccttgtcttcccttcccttccctataaagccaaacatacccatccacctaccttgtggtcaaagtcatcagcctcctgctccactcagtgttctctgaccctgcatatggaggtggtggcccctcctagaacacccaccactcactgtcagccttgcgtggtaatcacagattttgcaggggttacctgtgttcaggtgtgtcacctgtggaaccagaactcttggaaggactggcagagggagctgcttaggatatctcagggctcctggcatctggtctaccacagggctattaacaacagcacttagggacaaggtggaggatggacggttaagagggtaaatatggatgatgtgtgggcaaagaataggacacaggaacacatgcagtactcaaataattatgccaagaaaggtgaggacatggagatggacattcccatatacttctgatgggactgcagtttagtccctacagcaacattgacctcatcatgtttaacgcgcacacgctctgaccactatcctacttctgaaggcctccctgtgctgtgagctctgagaaggccaagcttgcctgttctgtctctgctaaagccagagaccagccaatagcccagcacagggtacttcataaatacatgttgaaggaatgagctccaggaacagtactccacatggtagagatgtgtgtatgaggatgttcactgcagaaggtcatgtcaatgtgacaagtgacgagcagcctcaaatccagcaacaggggtgtgggtaaaagatcatagtgtagccatgcaatggaaccaatgaaaaaaccacaattagagcaaatccacatgtattaataaaggaggtgccctccatacatgctgcacctaacagaatgttgccaaataagaatgaaaaatgatgatatttgggctgtaaaaactagaagtcagctaaataagaatgcatcgaaagtatttgtgaatgcttacaattttataatgccttggcatccgttttggatggaagttggactttctcataccagaagcagggctcagtcacctttgaaatagtttccagttctccacctccttccagttcctcagtgtgattgatcagatatctgatttatacaactgcctcctggtgacctcctccctatgggacttccggatacagcccgtatgactgccccactgaccccacaccctgcctgctgcagtgaccacctctaattacctggatctcatgtctgcttgcattaaatccaccaattaaaactccctgaggacaatctgtttgaataatattctgtaccctaataaaggccttgacccatgggttccccctctgtcctccccatactgcccctgacctctgtgtgtgtgtgtgggtgtgggtgtatgtgtgtgtgtgtgtgtgtgtcctccagacagggcctgtatcccccaggacctgtaagtaataaatctttattttcatcttatgtctctcgcaatcattggcaagagctctgcatcttaaagatcgcaaatttaagaaattggtgtagtcggcacaatagagtacctcttctgtttagcacaagatatctcggagctgctgaggcttttaacatcctcgccggtgtggctgcctcactggtgaggccgttctgttcagtgcaattcagttgctccactgtgtgctgctgtgttgctgctgtagagtgctgccatgttgttctccccaaattgttaccgagtaggaacctgtaatgtgctcccaaggtggtctaccccatgagaagggggattctccatctagggcaagggctaggtgtgtttctggaatcctaatagggaaggcatccacagagggtgaactccactcctccttagagtgaggagtgacatttcccatttattttccccatggaggtgccatgtattgactttttctttcactgtcccaaggttgagccaaggtgagctatggagaccagggcaagataccatttctgttagcaaagcaaatgggtgacaacgtgtggagaagctgtggttctcctgatggatatagcagagtgccatttagtaaaatcttgtcaggaggctgcccctggttagaccggcagtgtctgtagtcactaaggtggatgcgaattttaggccctgggccatggataatccctgcagacacagccgtggcttcatgtgatggggcaatcccgggctagtggctcccttgtttctgcatttcttgctgtggttgcacaatcaacacctcaggggttgattgggtcaccttggaaagagaaacagctgcctaggaggctggtgcacatggaggccaccctcaattttattctgctaacaagttgtaagattaaaacaacagggggctttgggtaccatcaggaacttgtcaagtaaacatccaaagacagaaagaagaaaaagaaaaagacattaaccgtctagaaatacaagccattttaaagattttgcttaaaagatgcgcttgggctgggagcggtggctcacacctgtaatcccagcactttgggaggccaaggtgggtggatcgactgaggtcaggagttcaagaccagcctgaccaacatggtgaaacctcgcctctactaaaaatacaaaaaattagcagggcatggtggcaggtgcctgtaatcccagctacttgggtggagaatcgcttgaacccgggaggcagagacggcagtgagccaagatcgcaccactgtactccagtctgggcgacagagtgagacttcatctcaaaaaaaaaaaaaaaaaaaaaaaaaagacgggcttgtttcgtcgttgtggagtcatcccagagagaggctactccctagagtcactgaccacctttcctcctccatcttttcctcttatcattctagagacagaaaacaagaatctcagctttaggtggctaacctcaccccccaagaaaagaaactaccactttgattgactacaaatccaagaaaaataaaagagaaactttaaaaagtactgagcaaaccacaggtctagcaaacataatgctagccctaggttacttattcatttacaacaaacccctagatataggaggaaaaaataaaaggtaattaaatatatacacatacaatattttaatataaatatataataaatagttaaattatgtatgtataatatgtaactaaatcaaagtaaaatttcatactttgattctattggaaattcaaaattcatttattaacttatatattaaggaatttatgtaaaaaaagatttttaaaagggcaccaatttgcttttgtgtctctacaacataggatctaatttaactttacatttgctaaatacactaattgacaaatattcatggatttaatcaatactggggctcaaattgtagccacacgtgggaatcccataaatttaaacactctgtccctattatcttgagaagaaaactaaatataaaattgaaaaaaacaggtatgtctcaatttacctgtaactttgcctaaatttcccggagtcatatacccattgctgtaaaacattctctattggacataggtgctctgagacaataaataaaatagaagtgtttttggtacttagacattggcttgacaaaatgggatcccatgaaacctcagttaagatagtgaatacggcccaatgtgagttgaaatggggcctttaaggattaaaacttattacatgaaacctagtaagtaatggggtgattatccatactgcttctccatttcatagcccaattttgacagttgtcaaatctggaaaaaacaaacaaacaaacaaaaaaacccctgggaatctgttgcctcacagagacacaaagtagacatcaaaattgtatatctcagttccagttccaaaatggtggcatagaagcaagctggctttactccttcacacagaaaaccaaaaacaaatatacagcaccaaaattattaccagatatattccagaactcaaatatgaaaatgaaacagttttcagagccacagagaagtgaaaaaaactcccgacagatgacaaaagaatcagatttccccatctgtaatgtccctccctgccccattctgcctggtaccaggtgtgtggaaaattttaccccaactcatggtttctacactgggaaatgtaagatcaatgcgggcaaccagtttctgcacaatcctgggttccctgtccctgccttaacccacaagaagcattgtgagtgcccgaagggagaaatttccctgaggacagtcaaagagtggggaggcaggactaccatctccttccctggaaactctgctgtgtaactcagccaagggagacatgaaatcagactggtgtttcagcagctccatgttgtagtaggtttgtttcacaggtatcctgggcatggacatctagccagctttcccacactgccaggatatcccctttgggacctccctcagttaggaagggcacactctgatcatttactagggccaaggtaaaccctaaaggtaacttagagatgaaaaggaggtagtgacctagcagtaaagaactctaagaaaatctatccaataaaaatcaaaacaagccagacaaagactaaaataaataatgaatccttcaatgtaaagacctggacttacatccacaagaaacagtaagcaggtaaccatgatctccccacatggacaaagtgaggaacaagtgactgatcctgatgagatggtgatgtgtgagctctctaatcaagaattcaaaactgcagttttaaggaaactcaatgatcttcaagaaaacatggaaaagcagttcagaaatttatcagagaaatttaacgaagggattgaaataatttaaagaaaacaaacaggaatcttggaattgagaaatatatttgctgaacaggaaaatttattagagtctctcaacagcagaatggatcagaggaaagaatcaacccaaataagactcccccaaggcataaaataatcgaattctcaaaagtcaagggcaaagagaagattttaaaacagaaagagaaaagaagcaaatggcataaagaagctccaattctgtggcaacagattttcagtggaaatcatacagaccaggagggagtgacatgacattctcaaaatgctgaaaaaatattgacatttgagaatactttatccagtgaagttatccttcaatataaaggagagagaaagtttcctagacaaacaaaagctgagataattcacaccatcagactagtcttcctgtaaatactaaagggtaaatactaaatacttcaatgtgaaagtaaaaaaaaaaacactaacatgcaaaacaaccacaacaacaataacaacatttgaaggtataaaatccactggtgaaattaagtacgtagacaaacccagaatactcaaatagtaattgtggaaagtaatccaatcataactctagcatgagtctcaaaatataaatctatcaaaaacaataatacattttaggaggccaaggttggcagattccttgaggtcaagagttcaagaccagcctggtcaaaatggtgaaaccccatctctaccaaaaaatacaaaaatttgcagggtatggtagcacatgcctgtcgtttcagctatttgggaggctgaggcaggagaattgcttgaacccaggaggtggaggttgcagtgagctgagattgcactactgcactccagcctgggtgacagagggagactctgtcttaaaaaaaaatagctacctgtttggagaaaggtaatataaaatatgtaaatagagacaaagtcaaaatttgcaaaggatgaaattaaagagtagagtttttttggggggttttctgtttctattattttatttgtgatctaagataagttgttaccttttcttctcttgaagatactttgttatatctatgtttttggaagtcttatggtaactgcaacgcaaaaaatctatgatagatccactgaaaataaaaaacaatgacttaaaacatactaccagagacaatcaaccacaaggaagacagtaaaaaatgaagaaaggaagaggggagttacaaaacaaccagaaaacaggcaacaaagtggcagtagtaagttcttacttaaaaatattgaacactgaatataaatggactctattctccaattaaaaggcatagagtggctgaatgctgcctatatgctgcctacaagaaaccacttcatgtaaaaagatacaaatagactgaaagtgaagggggtggaaaaagatatttcatgcaagtggaaaccaaaagagagcaggagtagctatactgatatgagataaactacaaatcaaagactataaaaagagacaaagaaagtcactatgtaatgataaagcgctcagttcagcaagaggagatgccaattataaatatctatgcatccaacacttgagctcccaagtctcccaagtatttaaagcaaacaatagtggatctaaaaggagagatagactgaatacaatattaattaggggactttaacaccctgctctcagcaatggccagatctttcagacagaaaatcaacaaggaaacttcaaagttaaactacacactagatcaaataggcctaactggcatttacgggacatttcactaactatctaactgttacagaattcacattattttcatcagcacatagaacattcttcagaacagaccacatcttaagtcccaaaaccagtcagaataaattcaaaaaagtttatatcacatcaagcatttgttctgaccacaatggaataaaactacaataaatgaataactttctggacacatacaacctaccaagatggaagcatgaaaaggcagaaaaacccaacaaaccaacatgaaactgtaacaaaaggaaaacccaggaccgaatgacttcactgctgaattctaccaaacatttaataagaactaaaaccaattctactcaaaatgctttaaaaaattgaagaggatggaacactttcaaactcattctacaaggtcagcattatcctgataccaaaaccagacaaggacaggacaaaaacaaacaaacaaacaaacaaacaaacaaacaaaaaaacactacaggattgcttgaggccaggagtttgagatcagcctgggcaacatagtcagaaccaatctcttaaaaaaaaaaaaaaagaaaaaaattagccaggcatggtggcatgtgcctttagtcctagctactcgggaggctgaggtgagaggaccaattgagcccaggaggttgaggccgcagtgagccatgtttgtgtcactgtactccagcctggggaacagagcaagatgctctctcaaaaacaaaaagcaagctgggtgtggtggctcctgcctgtaatcacagcactttggaaggctgaggtgggagaactgcttaagcccaggagttcaagaccagtctggacaacatagggggactccatctctcaaaaacaaccaaccaaaacaaagccaaaaaagaacataggccaacatcactaacaaacatagatgtaaaagtcctcaataaaatattaacaaaccatgtttagaaacacatcaaaagagatcattcactatgattaagtgagattcatcccagggatgccagtatggctcaacatatgcaaatcaataaatgtgatccatcacattaaagagaaccaagaacaaaaaccatataatcactccagcaagtgcagaaaaggcatttaataaaagaatgggttgagggagtggagcccatagtcagagcagcagtggtctgggattttggaagtagaaagaagggcagcaccactggccaggaccaccagggaacacccccataggccctgggtgttgtgctccagggagggttccctctggagttattaatcttggtgtccactttgcccagctgcccctcacagggtcagggaggatgaagggaaagcttccttctaatgaaagttcagggactcacagttcctagagcctgtagggagaggaagatcttcgaggaagagcacctgggcattggggcgtttgagaggaagatctatgccaggtccaagtggacaacctgtggactctctctccagggacatacgggtatctgggaatctcctgtagcttaaagaggtaaagacctctccctttagcctgaggactggaggatgctggttcaggtgaatgagtcctgcaggggctggtacaggcctggagggtggtggtgtccagggccttgggttcacccttagcatgattcaggccgggcggtgtttcacatgagcaagagggcctgggttcattgcttcaggacaatggtgaaatctcatggtggaagaaatcttgtccttgccagtgcccagctttcatttggtcttggcccagagtgtcctccctagagaagactcttgtcccttcttcacactgcccttcagggatatgccagccttatgggataagatggggtggagactgtagatgtgggtgggaatctctccacagagtgctccttctctcagcggttgcaccttgtctcagggcttcagcttgaaatctgggatctccaagcccttccctccccagtcctggccaggaccacatgggcagatgcattgtgtgaagtgcatttcatttggggtgtcctctctgcatggcaccctcccgttgattctctttgcgcatgtcagagtgcaggcaccatccacacctcctgctggaggagggacggagctgttgactcctgagagctgatcatgtgttcccaccctcacacacaatcatggtccatcctctgagggacatgtgttgccaccactgtggagatggtgcaactgacagtaacaaacagtaaaatctggtactgaatgggaccttaagccaacaatgacaatgtcattccaaggtgtttcatttttattgattcaatgcaagtcacctgatttcattgactattcacaatagctcgataaagtaaatgcatcatcaccaccactttaaagaggaaaaaggtgcttgggcagtttgtgactactgtggtggctgctgcattgctctctggtaaagccaagtaggtggtgggtgcggcctctgggctgggatgatccaccctcctggtggtggcaggggagccaagctggagccatggcctgtgcagtggtagcagctgaactgaccgctgctgcaggatttgcaagctgttacattttgcgaagccatgaagcacataaaacctcaagtagaacaagtgtttcaaagtctaccaaaatctgccttcagagattattactacagaggtggatatgaacccaaaatgacaaaacgggaagcagcattaatactagataatgaatgaacactagtaatagtagggtaagccctactgccaataaagaaaaaaataagagatgctcattaacatgttatgctcttaaatcacgcagacaaaagagggtctccttatatagtagccacaatcaatgaagctaaagatttactgcaagatcaagctaaaaacagtaggtgtataatgaatttttaacttcatattagtttatgtatatgaatatcaagtttttataataaaatgcctccaaacaaagaatatttgatttagggtttaataacttctaagaggggactcagatgtttcctgtttcacagtcagtctgagagggtcatttttcctggagctgacctgggtggaggcctcacactgatactccccagcatcctctctcctgatggggtttatgctgagcatacagtggccctgggacagctccattctctccatgagtcacagacgctggtcatggaagatccactggataaggttccagagtcatctgtggggcaggtcaggatcacaacatccttttcttctgtgactctggtgttgctgactcagatggggtcggagccactgaccctgtggacaatcagtggaggtgctcaactgaaagtgggctgagggcacgtcttctcctccatccctgggtccttaaggtaactgtggaccccagaccaactgacacaggagctagaaagaaattatttaggaagttagtgagggtaagagcgtccttggcaaggtttcccctttaacaaaaagcagcccaagataattccttttctaacaaagagcagcctgaaaaattgagctacagatgtagatgagcaagatggaagcttgcacaggtgaattccagtaggtgtgccaatagaaaagggctgcctggaagccaggtatgttcaacatggagactccatcctcccttttctccattaccacatgtacagtaaaaaaccaggcaacatggcaccggccaggtagacaatccatctgcatgacaaaagatcagagtggggcagccagcaaatggcacagctggtctaaacaatctttcaccccctgtataaatcagacactgcctcctgaagctcatctataaaaccttctgcatttcactatggaagtggcaacccattttccccaggacccctctctctgtgcagagagctcttctctttctttcccctatgaaacttccactcttaacttcactctgggtgcctgcatcctagttttccatggccatgggacaatgaacctcgagtattaccccagatgaatgatgctgtttcacaatcactggttcagctcccttcttcttagggtttcacagctcggtggggagaataccacgcctcagtggtctggggagtgaggaacaaatgaagaattaatcagattttacttagaacgctatcacctgcctcaaccatcagatccatgttgggaatgtccaggcctcctctcttagatctatacccacttcactggacctgaaatcctgtgtttcccgatgtgttggtgtcactcctatgagaggataaaggagagaactttgctttctctccccactcacaccctgcacaagacagggcccaatatgagacacacactcgctcagtagttctctcatgaaggagggagggagtgacctcgagtgattctgccatctgtagtctgtgtaccctggccagtggctgtatcttcatatgcctcagtttcccctcagtaaaataggacacacaatgagaactaaaaataaaattctaattccccagtgaactgaaaggatggcctcttggccaagcggatcccagagttcctgatcatgacaggatgggaggttacacctcattacagcccctccctttggaagtttagaggtgacaactgactagcattaacgctaaaatcgagatcatgagactgacagaacagactctctgtggccataagataccaaattataaactcaacctaaggtcatgcaggcaagggctaagccacactttcctacatttaaagaataagctatgttctaacacagaattttctttctctctagcggctaaagtaacactagccttcgagataagcaatattgaaatgatcgcggctcatccaccaacactggctaactgacccctgttccaacagccacaactacacttcaattggacaggagactgatttcagtaactttctcctaataagagaccactgagcatggcctggttctgctggtatacagacacggtgcactgagtaccataatgcttgtttcatcttttgatgtataagacctaatttaatacatttaaatctgaattctccaccccaaagtgaacatggggtgcatgtagcatgcatgtttgttgatcacgcatgtgcgtgtacttcctttgtgagtatccatagctccacctataacctgttgaatatgtatacctggccaactcattcagcataaatctatcttccacattcccctcccttgaagtgcctgctattggtctctgctggaggctgcatcttctaccctggggaatggccagcctgcaggctgtaaccctgtgtaagaaataacctggttgggtgcagtggctcacacctgtaatcccagtggtttgggaggttgaagtggtagaatagtttgagctcaggagccagagactagcctgggcagcatagcaagatcctgtctcttaaaaaaattttagggaggagagtgaggatcagaaaaaatacctattggctattatgcttagtacttggatcatgaaataatctgtataccaaacccctgattacatatataacaaacctgcatgcgtatctttgaacctaagataaaagtttgttttaaaaactatctgggtgcagtggtgcatgcctatagttccagctactcgagactgaggtgtgaggagtgcttgagctcgggggattgaggctgcagtgaattatggtcccacctgtgagtagccacttcactcaaacctgggagacagagcaagaaccggtctctaaaaaaaaataaaaatagaaaaataaaatgaaaaatatatgaaataaagtctcctttccaaacgtacagatctccgatttttctgccaacaatgataaatggtcagtggcttgccatgttgtctgtgaattacttttaaaatattcacgatcacctgacctaaaggttggtaccaaggaaccgcctgaatacaccgtctctgattatttgcctccaacagagtgttccctgggcctgatctctggtggacaatgagctgctgggaacatcctctcttctctattcctcccctggggatgctgaccttcccttggagtctcctaagttccccagggcagtcggctaatgtcctagggagcttacctgtcttctccataccaagtctcatgtgaaggacgaggctttgcccttgcccagatgaggctctgggggctgagccctggctggctaccagctgcaagagccatggcccttggacagctggtaaatccttgttcccagtcagccctgcccaagatgcctcaacccagccccggcacaggcttcccagggtcacatggagtcaggatcctgggacaggggactggacaggggtttccagggctgagtttctgaacaggggcttcccaggggtcccctcactccaggatctgacatggtcctacaaggaacgtccatggggaggggacccaggagggggaactgacactgacctccccttactgagcctccccccaaccccatcagactgtccttcctctgtagcaagtgcctgcagggtctggatgcaggaaagaaattctgatctgtggaagtttgtctcccctgtgtgtgtcttgcactaaatgtccaaacccccaaatgggatgtaatgtagagggggacacaggcacagcccaggcctgaaaatcctgtgtgtgtgaagcagaactgacccccaacacccagagctcatgagacatcactgtgtacgtgaaactggccagttacttcttcattcacaagatctgtttttatgacttgtagggtgtaggatcctgtgtcattgttggtgacattctgtatcagcagacatgtattggggtatattgtctctcagcctctgtggcaggtcctggggtaattacttgagttcctagtacatatcctgtaattcccctttgtaccagttgtagccaagcctaaggcagattgtgggtgagtggaagaatctccttgccttctgcagcttcaacagtgacttgggcagtggtaggcaagttccagaaagttaaaagtgaggctaggagtggggagagagcatcagttaatactgggccctatgcattgaggtggaaagatggggccctaggtcctggacaggtctcttcatccctcagccttggagtgtgtgtgtgtgtgtgtgtgtgtgtgtgtgtgtgtgtgtgcgcgcgcgcgcgtgcgtgcgtgtcctactgggccaaggtcagcagcatgacctcccttccttcagtgcctctgaccttggcatttccctgtttggagtccttttccccaggggtctgcctggctccctccctactgccttcaggtcctgctcacattagggcatccttgggagaccccttccctgacacctctagagaccctgggtcttccctttctgacctttcgctgctgtgttccctccagggctcttgtcaatacttgacctcacattctagatacccttgcatgtctgtcttcctccctatgagagcatgagctctgtgagaacagggacttgtgtgatcttggttgcaccccagtgcctgggacaggctgcggactcctgtggatgagctcatgagtgttcccagggcccttcacaacgtgggatttattttccaatggctgaggttgttggctaagagctctgttggagttcaatcaggctggtgggaaaaatattagagatagttatagagatagacacaaatcttcttggaagaccaaaaagtttgcataactttggtaatagatctgactgaaggtggtccctttacctttagttaaacaaattaaagtagtaacaaaggaaggcagagtagtttgtctagccagcttgtttactcatgtgatcttaagactaaccattgatgtgccacaggtgcttaattgctttctacttgggaagtccacaatgtcaattaccctctaacggtgttgactcaagcctttgttaattaatcttactgaataaatatgagtctcactagctgatcaaggccatggtcacaactgtttataggactcagcagggagtctgtaagcggccctgacagactcagctggactggcaaagcaaaatatgtgtgtgtcagtgtacactattcacccgtcccccacagctggtgcccctatatgaggagtgctgccacagagctctgtttagtgtcccttgttttttttcttgagtattaccccaacttaaattgtgattattgtcatctgttttcaacattaactgctcagtgatgattcacttggaaaacattaacaatcgagattgtttcttcactaacaacctcagattatttagattttcctgttgtaatcccttcttcctgtttagtgtccaacagaagccctctgtccctctcaggtccccgttctctccaagaaaccccagccagtctctgtgctccctcctcccatccactcccagggagccctcccctcacctgtgagcagaagcgcctgccagggatgtgcactctgtgaggaggggctgagggaggccccatgggctctgctgtctgctttgtcctcctctgtggagaggagcttgggcttcagaaaataaggaggccagaaagtaaggaacaggctgagaaataatggggatgtgtcgaaaggtcacagatgccaacatctttgtcctatgcaatattatccataaaattacaggtttgagatatgcttaaattttcttctaacatgcattaaaataaacatataacttttaatagttatattaaattgtatttaatataaattaaatgctcttgtcagagctactgtgactgtcagctctgctgtccttcctctctctgtgctaagcctcctcccagggcagaagcacttcccagggccaggggtgggggcggggaaaggtaagtggcaatgaggatctgcacaggtagcctttccgcctcctcccctctcagtcctgcctccttgtcttcttttcctctttttctccaatctacatttcagttccttagaccacgctgtgagaagcaaggcttattgggacccccatcccttaacaggatgacctgtgctccccataagtgacctctgctgtgtctagggattggctctgtcagcacctcacagagagtccctggggcccccaaactcagtgttattttctctatgacacagaaacccctctgggtatgcaaggttttcctcatgttttctaatgtctgggaaggttggatttactcccagcagggaggtcacagagatgtccagggagtggggtcctagaaatggacaaatctagagctaaagcccaggtctacgattttcagttgtttttttctgcagtgctatgtgaccctaatttcctaggagtaactaaaatgcaaacctcagacatttgtagacattttatgatttttctctacagcttgtaccactgttattattatttgctttatgctttttcctaaataaatttactttacaaaacatccttgtcctagtagggtgcaggggctcacgtctgtgatctcagctgcttgagaggttgaggtgggtggattgcttgaggacgggaatttgagacaaaacatctttgtcctatgcaatattatccataaaattacaggtttgagatatgcttaaattttcttctaacatgtattaaaataaacatataacttttaatcatcatattaaattgtatttaatataaatttatatacaatacatttttatataataaattatatatataaatgtatatataatagtttttcttttttgagatggagtctggctctgtctcccaggctggagtgcagtggcacgatctcagctcactgcagcctccgccttctgggttcaaacgattctcctacctcagcctcccgagtagctgggattacaggcgcctgccgccacgcccagctaatttttgtacttttttagtagagatggggtttcgccatgttggccaggctggtctcaaacacctgacttcaggtgatatgccgcctcggcctcccaaagtgctgggattacaggcatgagccaccatgcctggcctatatattttatataattatataaagttttctataataaattttatataataatatataaaatggatatttatttaagataaagttattagttttatatatttacatatatttaggaataaatgtgttactgtgggagcccagtgcccaggcaggtagtcagtacatgatggttgtcattagggttaatactttggaattctggattttttcccaagagagtgtctacgctggaatattgggcttgtggctttctgctgatgtgcatgtgtgaagaagctacttccacttattaggacttgtgtatctgtctcgcagtttcactacctattttctcgtgatgttggtcaagtcgcctaacttttctgtgcctcatttacctaatttgtagaatatgggtaacagtacacaagtgtgagtgtgtatttcccaggactgaccactagagggcgtgaaggcaccggcacttactattacagcaatgggtgtagtagtgctcatggtcgtaaacatcattctcccatgaaaggaaccagggcttcctgggagaaataactgattccagggctggggccggaaagcacaagcggagcctggagcatctcgtgaggccagaaagtaaggagccggctgaaaaataatggagatctgtcgaaaggtcacagatgccaaccagaaggagctttgaatgaccaattttgagacaaaatgagcactataagaaataatgatagtaataaattccaacccataaatacccatgagttcctactaatataaataaataattgaatacataaatatataaggatgaagaaacagctttttcttacagcagaattccaattaatgaatgtagaaggaatgatcaaatagaaaatcactatttggctaacagcacagtcaattgtttgtaggcaagaattatcaatggactttaaatatgaatgggtaaaagtatgatgatgctacaactagtgagtaccaagggggaaaaaaaagtacgttgagaagaaacaggctacttccatattcccaaagtatcacttcaggagctacttattgattataatgggacaaatagtaacttacagtagagaaacctggcaacagagtctctccgaggtacaaaggctctcttcaggaaggaggtaaggggaaggaagaagaaaacactgtcctgcctcaattatttgctttccccattctcaagtgtacttcatagacattcaaagatatgtgttgatagtgtccacgatccacatggctctattatagtcatttattcacacatacattcagtgaggctttgagtgcctaatgtgtgcctgatatttgctagatggtggatgctgagaagatcaggtgtgctgctgtctctagggtgactgaatccacctgccccactttacagatgtggaaattaaagtgaaaaggatttataggattagttcactgtcacaaggtcactagccttaaagttacaggagtaaagcaagtttcctgacttgctagattttctgctgcaggtgctgacaatggtgagctccaataggagagaggacactcagagtgaagtgggagccctgaacaccctggattagccaagaggacatgccgggtccagctgtgaccgcacaaaggaccattggggatatttgtattctctttttcacttagagcttgaaatgaggaaaactaagtgcagaaaaccaagagtggaagatttttcacaaagcactggtaacatgcatcagaaaaccctgtgctgatgtctgtcacggtgtttctcactgaacggtaatagtctggctttgagtgtgttccctctacagcctggagttctgcgaggcagggaccaggtgtgattcatctttgtctctccagtgacagtacacagcaggctctgataaatatttcttacaaaataaaatggaataaaaagtagacatctgcacaggtgtgggatgactgagcagcagcagaagcaggaaaagtcagcgtccccagatcagctgatgtggtgttcggattctagataggggtgaggtgccaggatggggatgggggtcctgtggctctgctgccctgggggacacccctaggtttcacagtgcctgctgtggttgctgcactttgcttccccatgggaaagtgatcagagggtgtggggcttcaggtgaccccatgtgggaaatggccaagggaaggtggggtgggcggcacatggttttttttaaccaatatttgaaggtaggttgtatgaaaaggtgttaggcttatttcagcttatggggagtaggacagggattggtgagtgtgtatcaggtatattttggctcaggatggaaaagaactgtcacagtaacataaggtcttttgggaaattacatgtttactggcagagttcaggccagggctgggtgtctgaaaatacctgtcagggtcacttttatggttacaagggcagagcttggcttggaaccaggtttcttactaataccacatattaagtattataaaaactgtcctttgcaataggacattgctctatgatgcaggttgaggtccctctgtttaagtaattgtgggtggctgtgattctctcatctagtctgcgacttggacttcacctccatctgcagtccctctcctttgctgttgacactggtcagagttaagcgcatttactgacgatggtcacagggtggcagcactgcctctctggtattttctaaaacctcttcctggaactgagccagtctaagaggatgtcatgactaagaaaagggcactaatgaggtgaacagataattttttttttcttgtttctcctgtgaagtaacagagtggaggtgagcatggaataattgccttttagaaatggaagacaatggagagaagtgtttcgcaaaccttaatgtgttcacagatcccacacagatctttttattcaatacagattctgatttttctggtgaggcctgagattgtgcatgtctaaggagcttttggatgatgccattgctgctggttggcggaccacactttgagtagcaaggctcgaagatcatttagaggttaattctcactgcatctaatttatggatgaaaacaaaccaaggtccagagagagcatatacagcttgcctaacaaagccattccctaagtgcctgacttcttgcatttaaacccagggcttcagcctttgtccagttctcactccacacatcacacggtttgttcactgttgtgaacgacagttgtggcagcatctctttagtttaggaatccagagccccaatttcactaccctctttggtcttggctcatgctgtgacttcgaatagttttgcccttacttaaaatcttcagtggctcttttgtaatcacaagatcaagttcgaatatctctgtctagtgttcatggctttataacatatggtatctctttagtaaccttacctaacttccctgttttaaaattgtctcttgctgccatagccctccttgctccttcctgctccctaacaaactgtgttcacttctctctcagtggtagtgatgatggcatggcctctgatgttagactcatgtaacttctaatcccagatccaccaccaacattggcaagttgattcatctttctgaggataagcatcctcctctgaaataaacttagatggcggttgagaggggtaaataaaataacacacaaacccactctcatccctgagaccctcttcaaaactagcatataaaaatagctatttgaagaggttcagtgaaattcaaggtaacacagagaaggaattcagaatcctatcagataaatttaatagactgaaataatttttaaaaatcaggcagaaattctgtagctgaaaaattcaattgacaaaccgaagaatgcactaaatctttcaacagcagaattgatcaagcagaagaaagaatttgtgagcttgaagagataatatatgaaaactcagagtcagagagacaaaagaaaaaagaattaaaagaataatgcatgcctacaaggtttgattattaagctactcaaagagatacaagagaagggtgaaaaccaacataaagaaatgtaaaaaacaatcagaatataaatgaaaaattttctaaaatgctagctagtttttttttgagacaggctcttactctcatcacccatgctggagtgaagtggcacagtcatggctcactgcaggctcaacttcctgggctcagatgattctcccacattagccttccaagtagctaggactaaaggcgtgtgccaccaggccaggctaattttttgtatttttagtagagatggggttttgccatcttacccagggctggtcttgaactcctgggctcaagtgatccaggagattcactgccaaaaaggatataaccaagtcatatagtcataggttatctaaagtcaatgtgaaggcaagaattctaagagcagtgagacaaaagcatcaattaacttataaaggaaaacctatcagtctaacaccagatttctcatcagaaaccttacaaaccagaaggtattggggtcctaatcttttggcttcttaaacagaatagctctcagccaagaatcttgtgtagagtgaaattatatttcaaaatgaaagagagaaatacagtctttttcaggcaagcaaatgcttcaggatttgtcacggctagaccatcctacatggaatgttaaagggacttctaaatcacaaaacaaaagatttaaatagaacagaatagaacctcttgaaaccaaaaaattcaaatggcctataaaacaataacacaataagaaaacaaagtagataacgatcaacatgatgactggaacaaatattaacattgaatgtaaatgacctaacactccacttaaaagacacagattggcaagataaataaaaaatcacaaaccaaatatcagctgtcttcaagagactcacttaacatgtaaggattcttatagactcaaggtaaagagatgataaaagatattccatgcaaatggaaaccataagtgagaaggaatagctatccttatatcatataaaacagactttaagcaacaacagtaagaaaaagacaaataaggcaactatataatgataaaaggatcaatcaaacaagaagatattacaatcctaaatatatatgcacctaactttggagctcccacattcataaaacggttatgatgagacctaagaaaaaagatcaacacaaaacagtgagggtgtcctgggttttctttttattggacagcagtgtactagcctatcactttcccagtcaggggatttttggtctccccattcccctaccatgggttcatgccaaagtccatattttttattagtgtttggaattggattttttttttttgaggtggagtctcgctctgttgcctaggctggagtgtagtggcacgatctcggctcactaacctctgcctcctgggttcaagcaattcttctgcctcagcctcctgagtacctgggactacaggtgcatgccaccacacccagctaatttttgtatttttagtagaaacgagatttcaccatattgtccaggcttgtatagaactcctgacctcatgtgacagggaaacaggcactcagtgaacttcatgcgattgaggagttaatgataatgagagaagggctgtgaggggacagcactggggacaccagagcctgtgacgggctgagttgctgtgccttgggagatgcccttttgactgagccctgggaaggagggggtgtgggggcaggagctgcctgcagagggagtggcctcaggtgggcggccacctggctgcagggaagaggtgacagagttcgtgtgcagagcttggagggtgaggaggaggtgggttgaggtgaccttggtgagggtgaaccatggggggctgtgggccctgctgagggaggccagccagccctggacctacagggtggtttggtcttttttgtcccattcccagcatccactgagtggtgaaactctgcaggccagggaccatcccactggccagaaggagcgcacagtaggtgcccactcagtgcatgttgggctggacagaacctcactctgccccctgcccccagctttgggagctgcagcaaggtccctccccctagggatctccatgcctctgtctctgaggggtgagatggggagacttcaaagggccatctcagagtgtgggggatagagacgcagaagtgtgggggatagagggaggcctgggctctagacccaaaggaccttacacacctcctgagtcttttcaaatggtttcttctgttactttaaaaatgatgtaagtcatcatatttattgtaaatcccaggaatctaatcatgcgtaaaataaggtgtcttatccttgaccccaccccttccccaattaaatttccaggatgttaccactgtttgcagttggtgtgaatctctctttaataatactctgtttatctcacttgtcgttttacgccaaaatacccattgaattatattattgctgaagaccattcttttttttttttttttttttgagatggattcttgctctgttgcccaggctggagtgcaatggtgtgatctcggctcactgcaacctctgcctcctgggttcaagtgattctcctgcctcagcctcctgagtttctgggattacaggtgcacaccaccacacctggctaatttttgtatttttagtaaagacagggtttcaccatgttggtcaggctggtctcgaactcctgacctcatgatccaccctccttggcctcccaaaatgctgggattacaggcatgagccaccacacctgcccagaccattctgttctactgaatcatgtgtggtgggcacctcttatatcaatacatatggattttatcttgtgtttgttattggctcccctttttctcattgcatggctacactcaatgctttgtccacacccctgttcctgggttggaatcttgtgacagaaaatgaagtaacaaaggctaaagctttctaaagtggagtcaggagattgcaagacaattgcactttcaccagcaagagctcaaaccacagaatgttccaatagatttggataaacagctgaagtcagtattcaccagccttcaacatctcaactaggagaaccctaaaattaactaagcacatagaatggaatggacttgtgatttaggattccttctcagccaatgagctgcttctgaaaacaactttttgtggaaattacctgtaaagaaaaccctctcctgtgcttgtcttacagaacactagtcagggctgccctgattcagtggacccgaattgctattatttgtttcctaaacatatggtattttctgtgaccttcatctcaatcttttttttaagttactgggctgtttcccagttttcataatgacgagacattctgcagtgtttcatacacatgtcttttccccatgtggagtattgatccaggagctcattcagtcaacgcatgtttatgaagcatcctgtgccaggctgtgggctggtcactgtcttcagcagagagaggacaggcacagtcttgccttcacagagctcacagctcagggaggctcttagaagtgggatactggtcggagcatgtgcacattaaacatgatgaggtcaaggttgctatagggactaaaccacagtcccaccaagatcgcattgagttcctgtggtagaccagaggtcagggcccctaagatgtcctgagcagctccctctgctcagaagttttggttccacaggtgacacacctgagcacaggtgacccctgcagaacctgtgattaccacccaaagccaagagtgagtggtgggtgttctaggaggaaccgtcacctccatgggcagggttggggaagactgaggggagcaggtggctgatgactttggccagaaggtagggggatgggcaggtgtgcgctcatagggaagggaagagaagggagggcattgcaggcaacaacacaaaggttggaacctgccttcatggactgagaaaagcagggagtccacccaggctgcagctggggagggaagacatggggagcagtgggtctaggggagaagcagactgcgattgaccttggggactgggcagtgagcagaggtgtgttatgtgtgtctgtccccatcatagatatgaggaggggtgaggccgcgggtggcacctgggtcggtgggatttcatagtgcctgctgttccctagagcctctctgtatagagggtcagaatagatctgaggctgtggtctgggggaaggggctggtggtgcttaccatctctaggggtgggaggagagggatgaggatgcccctgagcagtgaagcctcaaggtgtgtggagccacagttgtctctcattagacatgtgttttgcgtgaggatgccagggcctggtggttattactgttgtcaagtttgcatgacaaggacccaggtatccagggatccagagcacagggcccctggtgaggggatgaggctcagatggggctgaccaggttcatgtggtcagagtgggagggactgatggagagacagagcctcaacccctcctgtcaggagctgtggctatgtccaggagagatgacaaggatgacccaggacattgagtgagtcattgagacattgaaggtgaggacagggcagagaggaccctggtgactgctgaaatgtaggatgtgaggagggctctgacccatgcaagttacaggacctccccacccccgagcccacagatgacccttaaattgggcatcctgagtgctgtgtgtgcccagcagggacactggataggctggacctgagtctctgtaagggcagcgctggtctgtaggaccagagtcttctctgtgggtgtgacgtgggcaggaattagcaagatgggggtgacaaggcttggcttggaggatctggtacagaagcccatgggcttggtcagctcagcttctcaggggctcagctggggctggaggagcaggatgctgtgctcagggcatgctccaggcagcgtgatgtgtgtggttccagggtcaggcacgggggtcaaaaattaaccatgaaaagttcccaccttctgtaggcagagaaaatggcctgattgtcagggtcagggagacttaccatgtggccaaagcaggctctcagcctcccagagaccacaccctgggtgcagcactcagctctgcagggtatggcaatagatgtgccaagaaccccaacatccagatgcatgcaaaaattttgcgatatataaaatagagcagatcaagtttccctgcaataacgttgttcctggttgtgtctttttcttgtaaactagacatggacatctttccagcagtctgttctcatctgccaccttcctgctgcagcacctcagaatgaacattcctgagacactgtccgtggtgctgacgaccaagagctatggaacagagtgtgatgtagaatcttctagttacctctgctctcctttcacttttaacaacagagcatcattaacaatgagaaggtggagaggtgttcaggatcttgaagtgacttctgtcttgctctcccataaccctgaagctgctgtagacattattgcagaaactgacaccacagtcaggatggccttgtccaggagcccatgtgcagtttgtagtgagcaaggatgagaaaatggtcttgaaaggggtgatggacagaacaggggcttttcaaaaatgtcacatcatcacccccagcatccgtgaatctgtcacatggtaagagaccttacagattaaatgaaggattatgagtttggaagattattgtagtttatccagatgggtccaacataatcacagaatcccttccttacaaatgagagagggaggtgggagagtcagagaaggaggaggagatgtggggatagatgcagaagacagagcggtgtcaagatgctgcactgctggctttgaagatggagaaagaggacacagccaaggatgcaggaggcctctaggaggtggaaaaggagaggaaacgcactctgccctggagcctccagaaagaacgcagccatgtgggcaccttggttcaagtttctgtgtcacttagcttgtgggaatttgtcacagcctcaacaggaacctacagaggagtcaccttgtgtgcaggtgggatccagggtcatttacagctaaatcctgatgtaaatattgcaggttgcttttcctacttcctatctcatggccaacaaccctggacaatggcagaacacccttggaaaccacggctctgtgctttagtggagggaccagcttgtttgtgggaaggtagcacctggtccaagtgaacctacatgagatcgttactctccccagggccctcagggaagggctgagaacagctggcccaggtgtgtggaggagctgcaggtgaggcagggctggaggggcctgtgggtccaggtagaggggcagacaggttgtcccatcgccatgggagcctgcacgagctttaggttggggaaccctgctcctctgacctggacgctcctgtgtggagaggaggcttgctcagtgagatccacgccagggggtaaattgggaactgatgggaaatgaggggctagagtcctgggtagtgcctgggaggaccttgctcaaggactgaattcttggtctgttcccaccttggttactctgacaacccctctctgtgtcccacggggataaagatctcctgagcagtggccattgggacagaggagaacctggtggccagagctaagcatccaggatcctggatttggggacaggcaagctcattgctgggggacagtgatagatacggcctccagggcctgggtgaagagagcaggagggctcaggacactggaggctgtgtggaggtcacacccacgatctgtaccacccatggatgctcctgcattgctcacctttgtgtggacatcagatggccccaacttttgcactcctgagacatctcatgcattcacagagggacccaggctggggctgtgcatggccttggtctctagggtagtgtgaggacagctgagcactcagctggctgggcaggactcctgcgaatcctgccctttcctgtgtagggtccaccccagcctgactcctaaccccctactcctgtctttccagggaagagagactggggttgagataaggtggagatatttttcctgtgtgacccaggagagaatggacatggagtttcaggtgagtttctgctaagttcccatgagcagaaaaagagccaatgagaggaagtttcccctttattcagatcctttccaggtgaccccgggtgggccataggcccattcactttccctgcaagcccccgcttcctgtggtgatgggaagccttcgccttggcccacccagagcccggggcagtctgttgaggtctctatatattcagcagggacccccatcccttcctgtccccaggcctgtgtctcctcaggactcagagctggttctctggctcaggctccatgtccttccccatccccagggctgggggcttcagggacgctccatcaacccacaggagcagctcccagaggaacctaagaagccacatctgctttgtggtcgatccagcagtaaatgtttgtgtcagagtgtagcaattccagtaaaaacagagaagaggtcttgacccctgaggccttctcagaacagggtctggcatctctctctgggcccacccagggctactctgggactgaacctggctgtgctcagggggttcctgctcccaggcccctccctcctctgctcaccacctcctgttattttcactgcagtttcctgaacttcagctcagccagatgccagtggggacagatcctgggtctccctggggcccaagggaccagaatatctgtggcccccactcacctcatagatgagagcagctgccctggtgctgggtaggggaatctgggcaggggagagaggggtgtcaggggacagggaaggattcctgctgtgtaggaattccagggctctcctcaggtgatggagggtcccagggtggggttagcacagggagtggatgatcctggccctgaacagaggcccagctcatggccagggcaggtctaaccttatccaagtcattctgggtagggtgggtttgtgctggggattgacagtccccctgccctgagcctgcacagctggggccccagtggaaatgggattgggaacggacagtcttacctaggagatggagctgtcagagggtccatggcctggggacagagacaaaagtgagcacgagagtgttaggatagctgggcccctcctgcaagagtgtgtgggggtcctcagttcttagagaattggggagagggagcctttctcaggttattttaggggtcaagtaagcaagtgaggttgaggaagtgacccatgacccagagcccggaggttagggctgacccggccagttggggtttcctgtgtgatgttttatgggatcctctttgcagccccagggatagggtcagaggcccctgggtgtaactggcaggagtggacaacttggggctggcttagtagttcccagccacacccagactgaagggacactcaccgggggtggaggctgggggctgctgctccctgaagtcactctgatcgctggccctaggaaaggtcagggttatttgtgaaggtgcaaggttaaaagtcacaaattggagttaaaataggggaccaggaaaggagcctatttccaagaggggtatggagacctcctttctttatggagttctgtggtaggaggggcccaggtgaggggagttgaggaaaggccttacaaagccacatctgtcctggccagaggggaaggactctcaggcagatgctgggccaggagaacattgatccagtgacacaggaaagggactgaggacccagggaaggaatcagaccaccaggggttgcctgagaggaagggtcaaggcaccagggggaaagcagggccaggcacatgtgcaggacactgaggggactgcatgcatcttggattctcctggaactcagtgtccctgctgtgaccagacactccactcagggctggagatgctgaaatgggacaatgatcttgtcttctgtctctgccctttggcaagagacataaacgacattccaggatatgccatattggggccccggttctcccttctcacagctcagtgtctgcagttaccatgtcagtcaaaggggtgctgaccccacccagcccgtccaggctgttccagtctccactatgtgataatgcccaggatcccccctcagatgccctctcactgggtggatggattcagtgaacagggggaggtaccaggtattgagcaccgctcccccctgctccaggcagctgtggctttgctgtgctaggaaactaggaccatgctcaggggcatggccttaattggactgaattcactgaggacaaagctgttgaggaagcagcccagggtcagcagctggtgaggaaggtgccatggaatgagagggaaggatccctggggagtcgggaggctggggagagcctggcactgaatacaagacagggtctccttccttctcgcctggggtcagcgtgaaggatgggagcagaatggggaaaagctgtggtacctgccagtttttcggaggagcaggaaacacacaagtgcagccaccagaagactcccaaccaggaccccgatcaggatgcctagagtgttgtcatctgctgaaagaagaaggcaaaggggatgaggtccaaatctgttccagggggaaccatgaggggccttgcagggcaggggcatggtcagggaggaaggaaatgccatggagcctgagtgtggtctgttgtgctgtcctcatagctggctcccttgctctccgtggttgcaccattttctgtgtcttaggcttgaattactgggatgcatcaactcctacattctcccacaggaagcctgcacctcatcctgctcctgtgttttttagtccctccttcctctcacatcactcctcttccccctgtttctttttttccatcccatggcagtcgtaaagggcaggcccttgctgccaactcaatgctgatgagcagggatgatgttcattgactgttttcaggggccttccacatggaaggcacagtgggaatcaatctacctgcagcttttctcaccctcccattgccttgagggagaagggtatgtgatattgtgaaatacgtatttggtgttcatcaccattgatatggttaggctctgtatccccacccaaatctcaccttgaattgtaataatccccatgtgttatgggagggaccttgtgggaggtaattgaatcatgagggtgggttttttccatcctgttcttgtgatagtgaataagtctcaggagatcagatggtttcataaagggaagcttccctacacatgtcctcttgcctgctgccatgtaagacatgcctttcaccttccatcatgattgtgagacctctccagccatgtggaattgtgaatcaattaaacctctttcttcatacattaccaagtctcaggtatgtcttcattagcagtgtgagaatggactaatacagtaaattggtaccagctagtggagtgctgctataaagatacctgaaaatgtggaagtgactttggaactgggtaacaggcagaggttggaacagtttggagggctcagaagaagacacaggaaaaaagtttgaaacttcctagagacttgttgaatggttttgattaaaacgctgatagtgatatggacaataaagtccaagctgaggtggtctcagacagagatgaggaacttcttgggaactggaacaaaggtgactcttgttatactctagaaaagagattggtggtattttgcccctgccctagagatctgcagaactttgaacttgagggaaatgatttagggcaactggtggaaaaaaaattctaagcagcaaagtgttcaagatgtgacttgggtactgttaaaaacactcagttttatgtatttacaaaggtatggtttggaattggaacttatgtttaaaagggaagcagagcataaaagtttggaaaatttgcagcctgatgatgcaatagaaaagaaaaatccattttctgaggagaaattcaagccagctgcagaaatgtgcataaacaatgaagagcaaaatgttaatccccaagacaatggcaaaaatgtctccagggcatgtcagagaccttcctggaagccccttccatcacaggactggaggcctaggaggaaaaaatgtttcctgggccaggcccagggctcccctgctgtgtgcggcctagagacttggtgccctgcatcccagccactccagccatggctaaagagggccaaggtacagctggggccatggcttcagagggtgcaagccccaaaccttggcagcttccatgtggtgttgagcctgcaggtgcacagaagtcaaggattgaggtttgggaaccttcgcctagatttcagaggatgtatgaaaatgcttggatgtccaggtgaaagtttgctgcagaagcagagccctcatggagaacctctgctagggaagtgttgaagggaaatgtggggttggaaccccgacacagagtccctactggggcactgcctaatggagctgtgagaagaagaccacaatcctccagaccccagaatggtagatccactaacagcttgcaccatgcacctagaaaagctgcagacactcaacgccagcctatgaaagcagccaggagtggggctgtaccctgcaaagccacaggggtggagcccaaggctatgggagttcagctcttgcatcagtgtgacctggatgtgagacatggatacaaaggagatcatttcagagcattaagatttggctgccctgctggattttgggcttgcatggggcctgtagcccctttgttttggccagtttctcccatttggaatgggtgtatttacccagtgcctgtacacccattatatctaggaagtaactaagcttgcttttgattttacaggcttataggtggaagggacttgccttgtctcagatgaaactttggacttggacttttgggttaatgctggaatgagttaagactttggggaactgttggaaggcatgattagttttgaaatgtgaggacatgagatttgggaggggtcgggtggaatgacatggtttggctcttcttcacccaaatatcaccttgaattttaataatccccacgtgttgggggaaggacccagtgggaggtaactgaatcatgggggtggattcttcccatgctgttctcatgatagtgaataagtctcacaagatctgatggttttagaaaggggagttcctctacacatgccctcttgcctgccgccatgtaagacatgccttttgccttctgccatgatttcaaggcctccccagctatgtggaactgtaagtcaattaaacctcatttttaaaaaaattacccagtctcaggtatgtctttatcagcagccaagaccagctcggtcgcggagatcctaacccagcagtgctagaggaattaaagacacacatagaaatatagaggtgtgaagtgggaaatcagggttctcacaggcttcagagctgagagccccaaacagagatttacccacatatttaataacagcaaaccagtcattagcattgtttctatagatattaaattaactaaaagtatcccttatgggaaaccaagggatgggccgaattaaaggaataggttgggctagttaactgcaacaggaacacgcccttaagatgcagattgctcatgctattgtttgtggcttaagaacgcctttaagcggttttccaccctgggtgggacaggtattccttgccctcattcctgtaaacccataaccttccagcttgggcattagggccattatgaacatgttacagtgctgcagagattttgtttatgaccagttttggggccagtttatggccagattttggggggcttgctcccaacagactaatacacccattttctggtatgtgactctaaagtccttagaatcttcaaagtgatgtctttttcaagctaataattgactgatgactggcagcccctaggcaacttcagaatgaggctggtcactgacccaggtaggattagagggttgggactttcagcctcacccctaatccctggggagggacctggagtttgaattaatcaccaatgaccaatgaatcaattaatggccaatgattgaatcaattaatggccaatgattaaatcaatcatatctatgtcatgaaccccaaaaggactgggtttgaagagctgaacccatggaagtttctggagtgtggtgcatctggggagggcatggaagctccacaccccttcccacatgccatgctctgtgcatctcttcatctgcatcctttgtaaagtcctttattacaaaccggtaagcctaagtatgtgtttccctgagtcctgagagctgtttgagcaaactaatccaacccaaacagggagtcatggaaacctcaatgtgaagccagtcataagaagctctggaggcccagacttgtgactggtgggaaggtggtggcaattttgtgggactgagccctctgctgatatgtccaggtagatagtgtcaggatggaattggaggacacctagctgatgtacggtgcagaactgattggctgctgggtgtgtgggagaaacccccccgcatcacatttggtcacagaagtgtgtctgtgttgatgattgttattgtggagtgagagcagaggaaaaacacagtttgagtttttccaaacagggtggaatcccatctgccaatttagaatctgaaacttatagtttcagtacttcaattaagattgaagtacttcaattcagtacttcaattaagattcagtacttcaattaagattcagtacttcaattaagattacagaactggtaagtgaaagtgatacaacaaaaatgtaaccaaagtctgctcaacttaacagctaataacaacaaagttcataaaaataataccagtcgatattgatagcactgattgagccctggctctgtgcatgaccttgttaagggctttaatcgcattaatctctgaataaatatcctcacaaccaccctgagatccaggtgtttgtaacaattctacagatgaggaaactgaggcccaggaggttgagtgtcttgcccaaggtcaaatacctggtacctattgtaaccaggatgataactggatgagtctaatccctgagttcttacccacattgctccccaggctctgaaggaatctcatccttctcattccgtgtatcattttacaccccccctccctcctaggaaaatatacaaggaaaggagtgagaggggccgagggtcactcacattttacagtcagcttgagggggtcgctcctgttggagctgactgggttggagacctcacactgatactccccagcgtcctcctgcctgatggggtctatggtgagcatatggttaaaccaggacagcttcatcctcttcgtgacctgcagacgctggttgttgaaaatccactggaaagaggttccagtgttatttgtgtggcaggtcaggaccacggagcccttctctgtgactgtggtgctgctggcttggatggagggctgagccactgactctgtggatagagtgaccaacagaaagtgtcttggggccatgctgcatcctcagagatctcagagtcaaatttagaacattctcctgtgaataaaggagaaagatgaaggacagggaggagcagagagaaccagagacacccatagcagcgagcagtagggactacagtgacctcagagaccccagggaccaggaggacccagctgcctcagaccaggaccagggagccctgaaaaccctcccacagatgagcggccccagagtcacatgagatgcaatacctggggtggctttaggagcaggcagtcagagaaatggaacatgggtctcagcccctaagggacaaggaagaggtgtggccagctcctcctaggatcctacatccaggacccagtctgtaaagaggttatgattattcctttcttttttcattaattccctccctccttcatcagagaactactgagtgtgtgtctcagttgggccttgtgcaggtacagggtgtagtgggaagagaaagctgagtcctttccttcatcctcccatgggagtgacatcaacaaatcaagaaattcatgatttcacgtccagtgagggaagaaatgtggatctgatgggagaggcttggacaatcctggcattgagtctgatagttgagacaggtgatttcgttctaagtaaaaactgactaattctccatttgcccgtcattcctcagaccagaatctccctctctgagctgaggatgcccaagaagaaaggagctgaaccaacatctggtcctggggtccacagatgccccacggtggtggccacgaccagattctgggctgcagacacacggtggtgtgacgttgagcactgacagcctgtgtgatgctgatgcaatttctctttaataaaatggggtaaatgtcaatggtccctggcttgccatcctctctgtaaattaacattaaaatatttacaattacctgacctaaagcttggcacagaatagctccaaataaacatcatctattattattttactccaaaaaaaaaaaaaaaagagttctctgggcctgattcctggtggagaaggagcggtccagagtgtcttttctctgctttccctcctcctgaggacagtgcacttcccgggacatcttttaagtttcccatccagtttaatggcctgggaagtttgtttgtctgtcctctccactctgactctcaggtgaaagatgaggctctgcccttgcccagatggggctctgggggctgagccctgcctggtgaccagctctaggaaccacggccctgggacagctggtaaatcgttgctcacaatcagccctgcccaggaagccacaacccagccctggcacaggctccccagggtcatctggagtcaggatcttgggacaggggcctggggcaggggcttgaagggctgagcttctctcagaggatcctcaggccaggccctgactgagtcctataagatctttctcaggtcatgtctatgaggaggaggccaagcggggttggactgagactgattttcccccgctgcatctcccgcatcagactatccttcttgctgtagggaatttccacggagtccggataagggaaaggaattctgatctgttatagtttgtctcccctgggtgtgtcctgcactaaatgcccaaaccccaacatgggacgtaatgcagagggggatgcaggcacagcccaggcctgacaatcctgcgtatgtgaagcagaactgacccccaacacccagaggcacggaggaatcactcaccgtatacacggagatggtgagatgcctgttcaatctgagaatttctgtatgtgacttgtagggtgtagtatcccgtgtcctctagggtgacgttctggaaatgcagatctccactgggtgatattgtctctcgaccgctgtatgcaggccctggagtcctaacgtgagtgtctattacatatgctgcgattagctggttgggctccaccgttttccctttgtaccagccatagctgtaaagattctcgggcagataaaccacagagagatgaacattctccccttcagcaacttcaaagggcgctgatgcaataaagagccaggcagtggtgggtgcgttccagaaagttaaaagtgaggctaggaaagggagagaatatcagtcaatatttgacctatgcattggcatggaaagacggggtcctgggtgcaggtctcttcacccctcagccttagagggtgtgtgtgtgtgtgtgtgtcctactgggtcaaagtcagcagcatgaccctcattccttcagtacctctgaccttggcatttccttgtgtgaaccctctttcccaggggtctgcatggttccctccccactgccttcagttcctactcacacaagggaatccctgggagacttctttcgtgaagcctcctctagagaccctgggtcttccctttctgacctttcccagctctgttccctccagggctcttgtcagcacctgacctcacattctagatctctttgggtgtctgtcttcccccccatgagattgtgagctctgtgagggcatggacttgagtgatgttagttgcaccccagtgcctgggacaggctgcagactcctgtggatgagttcatgagcgttcccagggccttccatatcctggggtttatttgctaatgtctgaggttggcagatgaagacagagtttcatgccctggtggtgtttttatttaaattgtcactgtgatatagttttactatcattttcaaaatgtagtggccactgacaatgaacttgaaaacatggaccaactgagattgttttgccccttggcaattccagttcacttagattttttggttctccttagacgctctctcccctgagtctctaacaaaagccctctgtctcctctcagagccccatcctccccaggagaccccagccagtctctgtgctccctcctcccacccactcccagggagtcctcccctcacctgtgagcaagagcccctgccaggggatgcattctctgtggggacaagctgaggggggccccatggtctctgctgcctgctctgtcctcctctgtggagaggagcttgggctccaggaacgctctagacagggttactgtgactgttgtctctgctgtccttccttcctctatgctgagcttcctctcaggcaggagcacttcccgtttatgggcaagggcggggctctgcctacaatgtctctctgtcccctcccctctcagtcctgcctcccttgtccctcctttctccttcctttttgcctatatttggttccctaggcaaaactttgagaagcaacgctgatggggtcctcataacaggacgacccactctccccagtactgacctctgctgtgttctggccttggttctgtcacagccggtagattatttccctttgtgacacacaaaaccagctgggccctgggtctcctcatgctctccagtgctccaggaaggcagaatgatgcccagcaggaaagtgacagaggtggctctgggggctagaaaggggctcactgggtgatggctgggaaggacccacccgctatcttcagtgtcaccagcctggcctctgacccagggacagagacccaggcctggaggtctcgggaggatccccagctcctaggtgtggagggaggtgtcctgtgtgtcctgggaagagaggactttgatggaaggaggtgggaggctctgggttctgctgtccttggtgaaggtttcagggggaccctctccatgtctggggtctgtgcccccagcttaactctcattctctttgcaaatacatatattttgtggatctgcagttgcctgaactgtctcatgtccctaaatctttgtatccctttttacagaaggtcaggaagggtgtgtacatgagtatgaggactatctgatcagggcgagtgtttgtttcccaaagatctctttagatatggtataatacataagataaatgtactgaattagcaattttaagtgtagaattaaatgatactaattctattcacaatgttgtacaaccatcaccataattttttaccagaaaatcttcattataccaaatggaaacttcatacttttaatcaataactccccacttccccctgccccacccactggtagcctctgatactatcaatctctgtgaatttgcctagtttacatgtctcatataataaggaattatatacgtgtattatttttttctggattatttctcttagggtaacacttttaagattcatccacgtcgtagcatatattacagcttctttcctatttatggctgagtaatatcccaatatatgtttatacctcaattttaattcattcatctcttaatggacatgtgggtggtttccacatttttgctattgtgaaaaccgctgcaatgaacttacacttggaagtatctgtttgggtttctgtgttcatttctttgggggtacatataggagtataaatatggggtcatgtggtagttctatgtttaagtttttgagaaacagccaaactgttttccagtttgctgtgctattttatattcccatcagcaatatacgagggttccattttctctacattcttgtaaacacttactatttaatattttttaaaacttatagccattctagtaggtgtgaagtgatagctcattgcagttttgattttcatttccctggtggctgatgaagttgagcattttttcatgtatttactgacaattttaatattttttagagaactatttattcaaatcatttgctgtttaaaaaaaatgggttatctttttattattcagttgtaatagttctttatatattttagatacaagtcccttatggggtacatgatttgcaaaatttttctcatattctgtgtcttctcactttcttcatggtgttctttgaagcacaaacatttttaactttgatgaagttcacttatctatttttaattttgttacttatgctcttgatgtcatattgaagaaaccattgcccaatccaagatcattaagttttactcctatatgttcttctaatggtttgataagttttgctattccatttaggtttttgaaacattttgagttaacttttgtatgggctgtgaggtaggggtctaactacactatctcgcatgtggttatccagttgttccagcacaatatgaagaggctaccattctttccccattgaggaatcttggcacccatgtcaaaaaccaatgggctgtaatggtgagggtttatttctggactcttgattctattccattgatctctatgtgcattcttgtgccagaagcacactgttttaatgattgtagtgttttagtaagttttcaaattaggaagtgagtcctccaatttttttttccagattgttttggccattctggggtgacttttaaaaaagatgtagttcaatggttctcaaagcaggagtggttcagctctccttttttggcagtctggagacctttttaggaccttaatctaagtagataaattattcccactttcttttctgagttgctatgttacagtgtatattgacacccatgaaataattgagagaccctggaagtgcttgcctacatagtgagggacaattagttccatgatcatgggcacagaagattttgttttgggaaacaattttgttggtggagttatattcatgcttactcttttatttgtcttcatagcctgcatctccttcagacttcatatctgtttattttcttgtttgtcctctggggtttgggtgttgggtgaccagtcagctggagctggaggaggtgcttagcaaggcagtgaccctggttgggaggagcagggctcagcagggtgaaagtagctgggccttgagtcaggagtggcatctggaaggcctgactgtaagggtcagaagggccagcaggtgggtgtcctaggcacaaacggtggctgctgctgtggactggaggaaggtaagaggccccgagtattccatgttcttactggctccccaactgaggattcctctcctgggctggtgctgtcctgcagcagggaggggttagacagggacggctgcacatcaggccggagtccatgtcatcctcttaggcactgtcactacagattgaggattctgttcataagccaagcctttgcacaaggaagggacccgggctctcaaggaagagcagctcctggtcagacctccatctccttctctctcattgcctgaggcctcaagcttggtctacctggcacaggggtctggatcctcctcccagggttggggtcttactgagctgggcacctgcaggtgggagaagatctggaggggccccatctgccttcaccagattgatgttgagggtccctgagtcctgcaccactatcaggtgctgagcaacttccagtgtcagtgacaaccaccccatggtggaagcagaaccacctcgtgagaaagcacctccaagcctcagtgcttgccatgtgtgggaatttgctggtttcagttgggggcatgttggtgggtggtcatgaattcagggccggattctatgctcacagtgcacatgctggatgtggtacagaccccaggcagggctcagtggggtggttttgggtgtgcacaggtatcttttctggaggagctggtggtgatttggctcccagaagttcctgagctctgcagactcaccaagcactcaatatttgagtgaacattgggcgagagagcagaaggtaagtgtcagggcatcggggttggtgcctctgggaagaggaggaacattctgggaacaaagctctcccccggcttacagggagcttcccatcgctcctgccttgaggatcagggaaactagggcctctgctcttccaggggctgcttgcaggcagtttgctctgggagggggtgacccaggagttgcctctcattttgcatttgagatttaaaaggagaagggacagtatatcttgccaggtcacaaaaattacaggcatcatattgactgaagggcactcctgtcatcactgcaatataccagaatggtcttttaaaaaaataagtgatttaggtttaccagcaactgtaatgcttgttttattcttctagttcaccgttaatgtcacttttgtagttttagcactggcaatgttgattttatgttgactctgatgattttaagctttcatttgttcacatagagatcatcttctttctgaatattaatgcattttttctctatttctactggttattcctgtacatagagtagagaatcacttttcccaaggaggtggaaagcttctgactaccaaaaaaaaaaaaaagtgtcaaaatgctttaaagtcagtaacttaaagatcaaatccaagagtgggcaacagattctgcccagggtctgaaaggtggagaggtgactggtgaggatgtttaaaagacctctcctctctactccctaaatgggggccatccagtgttcttgaggttcagagaaggcccagggctggggcagcagggcactgtcagctcccagctcccaggggccaggagtaagaccccaacactgtccagacactgattgcattcattttgggggagagtagattcttatttaaagaataatacaaaagtctacaaatatgaacataaacagaaattcctttgctacaattttccccttaataagacattccttcctaatgacatatgtgactgcattcatggctgagatgttttctaggatggtgagagcatcagagtggactatctggtgccttggggtcatgcattttcttcttccaatgtctacaggatcccccatgtcccactttgtagtgtaactcagtgtgtgtcattctggtttttgttgtatagatccttggaaagcccatgtcattcctgctgtgaggtacaggcagccaaatggcatcatctctaaacatgccttctcctggtacatcaaattatggaataaatgaaagccattttgacagatattgaagatataagtttctactcttcccacacatgcttctcccaagtgaaggattttactggtgaattgttattagagattagtgtggatcagtgactctgccaggggaaattttgccctctaggggacatttggcaaagtctggaaacattgttggttgtcagagctgggggagggagtcctgctggcattgagtgggtggatggtgctgaacaccctgcagttcacagagccccaccagtttgaccacccaaatgtcaatgctgaggagtggagagccctgctgtgccctcccgcagcttccctgaagcttcccctcacctgctcctcccatgtctccccaccacttccccacttcacccgcctccttacacctcagtcccctccacctgaactcaccccttagtccaaggccagccctgatctccgctctcctggtctccttgctccttagcaggaggcgcccactagatggcgcccttgcccttactggagctcaccgtctccctttccaccctgagacaaatgtggctgcttttactgccacaaccccagccctccacactctagatttgctcagggagcagctcctggacagacctcagggaccccagggaggagcctcactctggagattttgatggcatggtctttgaacttcactgttacccccagtcaggatccaggatgttgggagtgcatgattctgcccggtcccacttcagcaggaccccactgctgagttgtctgtggggacccgggcctctcatctccttcttgcattgcaggagagggatcttagcactgctttcacataaagtcagataatggaggagtgcaggtgagtttgggaaggtggacatgaagagaggttgtgtccctagaggtggcagcagtgagaggatgggcaggtgggaggaacacagcccatccagggttgccagccatattaggagcgacagcctttcctctaagcctccagcctttttcctgaaacattccagaactttccacttcagcacttcccactgaggctcctcaggtctgtccctgagctcccagctgagcctacctacccatctgaaatcctgagtcctgtgtcaccctcgttccccattattctgtgcagttctgtgggacgcccagctctcctgacacccccagtcttcagaatggccatcagcgctgtcgctgtggcaccagggtgactgccgcctggaggctgagtcctggcttcctgacagctgtggggcccgctctaggctcccttgtcctgatcattcatcacctccaggatgcacagcagctgggccagggggaggagcagggacaggtgtcagccaccctgtgtgtctgcaagtcaggctgggggtgtgggaggacgccaggaatgactgaactttctgatttagagggtgagagcttgcactgatggaatttgggatttaataggaaaagcatagcgttttcctattttgtaggcagggtggctggagtttggaatcatagattcccctgggatgtcactgtggacctcagtcccacccgttaggggcacagatttcagaatccacaccctggggcaaagcaggcatgggaggctccatcagcctggccagggctctctatttgtgcagctgctgcaaggagatgtgcactctgatgggaacagtgctccctcctccttggggggcagtatctagctccctgcagcccctctccctgcaggccctgccctctctgaacctcaccttccccaacccgccccccgcaatcccatctcagctgtaatcccaacactttctcatccattatgggtggactgcttgagcccaggggttcaagactatgctggctggacaatatagcgagttgttgtctctacaaaaagacaaaaattagctgtgcatggtggcatacacctgtagtcccagtcactcaggaggctgaggtgggaggattgcttgagctggggaggctgagttggcagtgagttgagattgtgccactgtatacttcagtgtaggtaacagagcgagaccctgtctcaaaaaataaaagtaaaaaaaaaaaaagaaatatggaatacattattgttaactctaatcaaccatgctatgcaatagtccaccagtaataccagtaatagccaataatgaattatctgaaaaagaatacaatttattcttagctatctactgctaaaatttttaagctatcttttatgatagctgaaacaaaagaagtaaatttaaccaaggaagtaaaagacctttataatgaaaactgtaaaacattgatgaaataaattgaaaaagacacacgcacaaatagaagatattccatgttcatgaattggaagaactgatattgctaaaatgtccttaccacccaaagtggtctacagattcaatgcaatttctgtcaaaacaccaatgatattcttcgaagaagtagaagatcctaaaattagaaaccacaaaaattcctaaaacctgcacaaaacaccctgagttgccaaagcaatcttaaacaaatagaacaaagctagtggcattacacttcctgacaatcaaagcatactgcaaagctatagtaaccaaatcagcatggtcctggcataaaaacaagcacatagatcaatgaaacagaataaaaatcccagaaataaacccatgcatctctagctaactgattttcagccaaggagccacatgcacacaatggggaaaggacagcctcttcaataagtggtgctggggaattggatattcatatgcagaagaatgaacctagaccctatccctcaccatgcacaaaaaattaactcaaaatgtattaaataaagacttaaatgtaagaactgaaactatgaaactactagaagaaaatatagggggaaaatccatgacattggtctaggcaaagagtttttggataaaatctcaacagcataagcaacaaaaccaaatataaacaaacgggatttcatcaaactaaaaagcttttatacagcaaagaaaaaaaaggccagcagagcaaagagacaacctacaaatgggaggagaatatatttgtaaatatatacatatatatttgtaaatatatacatctgataagaagataatatccaaaatatataagaaaattatgtttctgtatagttttatctgactgggatacagaggccacatccacagtcccatcctcaaaggccacttgttcccaaaatgtcaagcacatccctcaatgatccatcatcaacacctatgtctgtaggatgaagggtgaatcatgaagcactaaaaaggaagaaggaagccaatcccaaaacaaaatgatgcagggtctggaaagtccaaagcattttttttttttttttactgcatcttcctcctttcttctccacattcccaatcctcactattgattaacaaaacaaaaaaaactgggacccaccatcttccctactgtcaggagatctagcgagattgtttgagtcttagaccaaactttgccataagccaaatttctggctgactttacaatgatatgagctagcacagtctctttttctgccagtcaacttgtgctcggttttatttgcaaccaaatagaggtggtaaccaaatataggtgaccctaaaattagtcatcaggatgaaatcctaaaatgtgcaacaaactgggttgaattcaggattagtagcaacatctctgttgtgggcttgaaaagggggcacccttttatgcagtagcaaaattgctaaattgttgtttgctgagtctttggactctcatcccggattttctatgaccattcaaacagggctgcaatgaacatctatggttgtttagcttggcacacttctacatttctatatagtaatatctagaagtgcatttgctcaatcacaagatatgcacattttataattgactgctatcgaactaccttaaatagccttaatttgttctcaacattgtttaacagggtctgtttaatgtcctacgtccagcaaggacagtatcacttttcttaatatttttcaaattattggaccttaacaaatacttaatgtgcaattaattgattcctttgtattcccatgccttcttttatatgtttccttatagtacacaaaaccacattattgtttctttacttgtgtcattccaccctggaccattcctatctaaactataacattatgagagagagagagagagaaaacaatatgaaaatataaattgattaatcaaaaaaatttaaataggacaaatcaggaagacacaagagagattttaaaattattcagagaataccacaatagctgtaccaatatattttaaaacttagatgaaacggacaactatctcgataaatgtaaattaccaaaactgactcatgaaaaaatggatattatgaatagagcaataatcagtaaagcaattaaaaagacagttgataatttttatttactgacaacaataacaaaatttcaggtcctgatatttttatggtgaattttaacaaattttcaagctcctcctcaaccaattctcagaaggtttaaaactttaacaagaaaacactttctaacacattttcagaagctgttatagcatgataccaaaaccacacaagaaaattatagaccaatctcacttacaaatatacatgcaaaatcaaacaaaatcttagtgaaccaaattcagaattaataatagcaaacaagcaaaatatgttatcatacgtatggcttatatcaggaatgcaagtatgtttcaacatcagaaaatacttctccacattaacagactaaaggagaaaaacgcttgtttaattatctcaataggtttttagagaattttgaaaattttataaagttatgcgtattctgtaaaattgatgaaatccaaccttgatttatttttaaaaattgcctttcctatagaattataggtaaaggaaacacatgcatcctcacagagctacttcaaggctaagttacttcccataagtaacgtatcctgtaatgtgtgcttggcacatattcaatactaaacaaatatttgcaaatcctcaaaccacttctcgctcaaataacccacctttgtcttttgcctttatgttagggttgattttctcaattgtatcttggagatcctttggtgggtctttcagcaattaccctgaatttgcttttctgtttacaattttaattcctgggaactctttcttgttctctgactgcacccttttcatgagagttcagccatcaatcctccagaaccccaccccccccgcccccccaaaaagcaataaagatgtctaaaagcttccttctgggctttcgaatgatgtttaccccaggcatttgttctattcgttcatcacccattttccctacaacttgcctacacttgatatcagatttttatttattagtcacctatcttcttcattggcccattttcctattttgccactggttgttctcaaatgtgttatgattcctggttgtacagtcaagtggttgataatcttggatatacgataaagatttgctctgtagctgtgtgtaagcctatataaaagcttttgtatttttcttcttaaaaaagacaaaagatggttgggaagatccctccagttcaccagttcgaggctgcagtgagctatgatagcgccgctgctctagcctgtctgtctgtgaaaaacaaggggggcggggggcgggggggaagactggagatgtaaatctcccgcagggccctacccgtatccgcaacaggtctctaacaggaacagcctcaggcctgtgttggaacaaggtaggttacagaaatctggaagccagatctgtaacttcagggtaaggactggctctcagggctgatcccccgggctgggtgtcccagaggcacccgcccccgccccttccccaaggcaggccaggacaccttcactcctctccttaggctccccacccccttctcctccccactgtgcctcctggagtagcggtggcggtgccacaggggagcggggcggggcgggctctgagggcaagggggatgggccccgccggggtcactggcggccaccctggaaactcgacgcaggccggcccttctagtgaatcgtcccagccacagctggcctcccagccgcgcttggggcgcctcggggcgcgaatggtgcaggttggggagactcaccacgcaccgtcgggggtcggtccggttattcctcaccgctcggctccagtgggcgcgcgggcctctcctcctcagttcctgcgctgcagtccctccctcacccttcgcagcttgggaatccaactgtgtcattccgacggagcgccgtgaggacctccgagggtgttagcgccaagtgatctctgtccagcgctctgaatatccaagtaaaggagttcaatgaagggcgggtcaacggaggagaaaccgtgactctctcaagggagcccaaggcctccttgtctaattagtgacgcgccaatggatggaggctcttcccaccatctcttcccagcatccagtgacaccaccgccaagggacgggctcggcggaacctgcaggaaagaagcatcggctgagcctgactgcagcgctgtgaagagacaggggaggggatcagtagttggtcccgcgcccaccccctgtttccgcgaggggcggagttgactggccatgcaggcagagggcgaaatgtgaaattccactactcctaccgtttttccctgacccgatggggcggagtgtcgtcaggctaagttccctggcggtaaggtggggagattgaggcgcacacctgccgaacggtaacgcaggattagctaaggcgagctcaggacagaagcctcccgaggagcaggagggcaaaataataaataaataaataaataataaataactcactccttggtctttatttgcggcaggaattcagaaggtgaaagcggggccttaggatctttctgaccttttgggttttaagcaggaggtgtcagaaatgttaccacagggctagctggcttgtggccagcaagcgttcacaatgccctcgatttttcatccctctctgtgggttctttttttcattgtaaggcagaatttctacgattgctcacccactcagagaacctgagctggtttagaccaggtgagacaggctaggtttaccctggtgatgatgtgttgttgccatggcgatcctgcccagtaccagaggccctgcagattcagatgcttggtgcctgtgcttggctgaggggccaatgggtgaagctgccatctgcgggatgatgactgaagcctctaagtcagaatccgcccaggctgagccttagggcagctccatggagcctcggctggcctgggatagagagtccaccactgtgccagcccccagccactgcctaggtcctgtgctgagagccccttgtccagggaaatggcgtccagtggaaaagggaccacccccttgcccttcactcaaggcaggttggtgacaaccctgaagctaatccgttcctagaggagctgcttctgggtccgagttttctctgcagcagagcagctccctggatgggatctgttcaaagtccgcctttcacgcggaattttccgtccttgcaattttccacctccaccactaggggatcctctctgaccgcctcatgccggctctggcctctgagcaggggtttctcttctgcatgtgcgaccttgcgcatgcctagtggccttttgggacctagagctgctccacaccccgatggggttacagagtgcctcgcctccactccaccccaccagggttccttccctggctgggatgggatttcagaagcgccgaggaacagcccagacaggtgtgggagagtagccaaggcccctgtcccggggtggccaggacagcggtggcctcgcataggacctggctgggctgctgcaatcagtgtcctgccccttggagagcaacagtgaaaacaacaagactatcttcacccaccttaagaaagaacagaaccagtatccccaactctgctgtgtatcccaacccaattccattccccaccccactctcagtagccaatatgcaaaatattagaatactcttactgttattattttcaaccacactctgcatcctgaaaaaccatatatttcgttatgtgcttttaaacttcttgaaaatgaaatactgaggctgggcgcagtggctgacacctgtaatcccagcacttcgggaggcggaggcaggcggatcacgaggtcaggagatcgagaccatcctggctaacacagtgaaaccccatctctactaaaaatacaaaaaattagccgggcgtggtggcgggcgcctgtagtcccagctacttgggaggctgaggcaggagaacggcgtgaacccgggaggtggagcttgcactgagccgagatcgcgccactgcactccagcctgggcgacagcgccagactctgtctccaaaaaaaaaaagaaaaaagaaatactgaattttcaaatacttgctttttttttcggtcaaaattatgttctcaaatttcactcctgtagatgtgcgtggctggctgtagtttttgcatttttattattaggtattctcctgttgcattaatatgccacattttatttctctcatgtttttggtgaccacttggggtgttttttggttttgtatttttgctgtatacatgctgccatggtggacatacctctttatacatatttcctgttgtatgcagacacaattttaggatgtgacatcttcagcttttctattgtgtcgtgtgtcttttccttcgtgctttgtgttatttacatattctggacacagattctttgtcaactgtatgtgctgcacatctctttcccagtttgtgtcttcttcttcttttttttttcttaaaaaaaactttctttatagtgttttttttttctttctttctttgttttgttttgtttttttgagatggagtcttgctctgtcacctaggctgaagtgcactggccgatctcggctcactgcaacctccgtctcctgggttcaagtgattctcctgcctcagcttcccaagtagctgggattacaggtgcctgtcaccacacccagctaatttttgtatttttagtacagatggggtttcaccatgtttgtcaggctggtctcgaactcctgacctcaggtgatccaccctctttggcctcccaaagtgttgggattacaggcgtgagccacagcacctggcctgtgttctttcttaagtagatgttacttttaatataatagaatgtatcatattttgcttttatattagtactttttctatctaattcaaacacatccccaagggtctttgtgtgtagactgaccaatttctcaagaatcatgaatgaatactgcttctctttccccaatttatctgtaatgctacctttattataaagtttctatgcatgtgtagaaatagttcctgatttttcactctgtgccaccagcataccaatagcacgctgtcttaaatattaaatagcagagctttatgagacaacttgatgtgcagtaggcaattgcccccttgttactcttcttcagggttctttgttgtaccacatgaattttagaattggcttgtccagctaaaagacaactgcaaggattttatttggaagttcataattctatacataatttggggaaagtattttcataataccaagtcttcctattaatgaacacagactctctctctctctcccccacccccacctgtttagttatttatatctttatggtctgttagttattgtttattgtctttcaaccaggtttcatgtttttctacatagaggccttgcatgtgaaagtctttcttcctagcttgctattacaaattttttttaattgcactttttgggtacagtggcttgtactgtaatccccgatacctgggaggctgaggcagatggattgcttgagtccagaagttcaagaccagcctgggcaacataatgaggtccctgtctcaaaaagtttgttttaaaaattgcatttgctgttattcaacaaatgtcattgtgtctcatatatggatttttatatctgataaccttgttcaacaatcttttgattctaacaatatatcagattcttttgagttttccatatagacaataatgtcatctgtaaattataattgtttcttctttgttatttcttggaccttttattttatatttttgtcttgctgcaaggcaatatccctctatatattgtggggtcttttttctcataaagtggggatggtgaacacccttgtcttgctctctgattgtataaagcatgctttctgtagcattttgtagacgctcttttttagattgaggtaattcacttttatttctggtttactgagtttttagcataaattcaggctgaatttgagctaaagctttttctggagacatcatttgaaaaattcatatgatttactttctttaagtcaccaaagttatgatttacattgaactgagtttctactgtttaactgtattcttgggagaaaacccacttgtcactgaacaatatctgttttatttactgctgtcttgtgtctaaattttcttttaggattttttgtatatgctcagattagcctgttattctcctttctgtatttttttctggtttgggggtcaaagttataatagcctcacaataagagctaagaaaccagccctaatggaggccggggcaggaggtttggagttcaagaccagtctgggcaaaatagtgagacccccatctctatgaaaaatagaaattagccaggcatggcagtgagtacctgtagtcctaggtacttgggagggtgaggcaggaggattgcttgagcctaggaatttgaggctgcagcgaactatgattgtgccactgtactccagcctggatgacagagcgagaccctgtctcaaaagaaaaaaaaagaagaaataaaaaggaaaagataaaagagctaagcatctgtttccttttttccattttctgggagagtatgtgtaagactgtaattaactgtttcttgaataatgggagaactctgtaaaataatctggctttggtgttacctgtattggaaggatgaaaaataccaattcagtttcattattggttgatagggctactcatgctttttgttttgttttgttttgttttgtttttgagaggaagtctctctgtattgccctgttgtccaggctgagatgcaacgttgttcacaggcctgatcctggctcactacagcttctaacttccgatctcaatagatcctcccgcctcagccttcccagtagctaggactacaagcatgcagcatcacatccagcctcttttcctgcctgacccagttctggtttcctttagttttctaggtgttcatccattttatctaatgtttaatgcatttggcataagggtgctcagtgtcctttcattgtctgttgtctgtaactgttgccattttcattcctatttatgagtactggcgtcttctctcactttttcttaataatcctgctggaactttgctttttaaagaacatcttttgacttgttgattcttttttcatacatattaactattttcttattttttgcctttatatttatttcttttcctgtttgaaacattgctcttttcttactataaaaatgggtaagtagctcatgaattaccacctcttttaaaaatcttttctactgtaagcattttagcagtttacatttgcccacaagtaccacttcagctacaccctatgtgcttttacataaagtcttcatttttggtaagacatattctcaaattttaattatcacttgtttttaaatccatgatgttttatttgaaatgttgtttctaaagatacattttctggttatacttttattcttctaatttagcacagtggccacaaaacatggtctgtgcagtgcatacaatcgatgagtaatttctgagctgtagtatttggcataatatatggcaaaatttcctaagttttccatgtgtgctttaaaaaacttccagtaaaatacataaatctgttagatcaagcttctcacattgttcaaatagtctatatgtttactgattcatttgactgcttgatttatcaattacaggtaggaatgtattcaaatctcctattaaagtgtgacactcaagtggctttttaaagacagagatgccaaaccaatgaatacatgattttccccaaagcctgcacaaattctctaatgaaattttaccatgaaagtttgtttaattaaggcttactaaagcagtatgttgtcttttactttttaaacagagaatatatattttaatacatcgtttaagtttatgattaattatctattactgaggataagaatctttgcctgtgctcattcagcatttgcacttcatttatgatctgccttctcatagcttctgttaatttttatactagagacatttatttgtttgtataaatgttgaaggtttttttttgttgttgttgtttttgagtcagagcctcgctctgtcacccaggctggagtgcagtggcatgatctcggctcactgcagcctccatctcctgggttaaagtgattctcctgcctcagcctccagagtagctgggactacaggcatgtgccaccaagcaaggctaatattttgtatttttagtagagatggggtttcgtcctgttagccagggtggtctcgatctcctgacctcatgatctacctgcctcggcctcccaaagtgctaggattacaggtgtgagccaccgtgcccagctgggttttttatattataaggagatgtaatagatagatagatgtttcaaagatagtcaaatgtttttaaaatttaaaacacttttttacaggttgactttcaccatttaatttcatctatgtgttttgccttagagaaattttaaatgctatgtagatctcatgacttataattatgaagcattttgttttctgttttccacgaaacttagcttaactttgagcatataatagttgtaaaggtaggagagtaacactgaaaaaaggaattgcataaaaatggcacattttctgtagagttgtttatcgcctgaaaataggccccatttcatggaagtaagatgatcaggctcaggtccccagacgaaactcttggcatggtttttggagatagtccagggctcagtactggctctatcatttgctacttctcccaaagtaaccaatatctcatccaccctgagcccatttccatatctctaacatgaggataatagcatctaccttacacaccaagtagagggatcaaatgtaggaactaaatcaaagtaccagcactgaataacctacatcctcccacttcccaaaaggaagagagatgtatcccctgttgacaaacgagaccattttgcaggagagaaaggaaatgccagttcacttgcaatgtaaacatgctctctctttttagggatgtccagggacctgagagagaacccatgcttaccaaagagtttctagttccagacacacaggactcgaagggtgacaagtatggttttcagggtccctgaatccacccagtcctcacagaaactcctaaaagctgtcgattgacagcgttgagttcacagctctggtcctcacatgctgatactgcttgtgatatcgaacccgacaggaccccacatcacaattgatttaccaactacaatataatacctcctgaatctccaaattggctcacccaggaacaaaggcttggggtaaaactggattaggagatataagctctgaattttctgagggtgagacacacaaggattctaagtgacacgccacagagtaacgggtctgtgactggaggacccacagatttgtcttactggagacaccacatgcacacaaactccatccttagctgtggaaacaagggtcttttgctatcttagccgaattctgggagtaatttttggaggggaggagatctttgggattgcctctttcaggccctttacaaaaatacctacttcttaaatggtaaagcttacactaaactgaaaaaattacatccttggctttttatgaagtaggtgttggattgaatcactactggaagaagtatggcatcgcaaattctaagcagtggtcaaaggatggatctgttaaattagaaaaatctctaaatttataaaaagattttagattcctttattctaaacaattgacctatttgtactcatgggacaatcaaatttcaaaggagatatgtaacgatttcatggcttgcattaaaaatccttctgataaaattaaagataaaaaatctgaccccctgccaaaaaaatcttttgaagttcatactgcctgctttcaatattctgtgggattcacaatgaaaggtgccttatattgtggcctagcttcaagtttatgccttcgccaccatggcctgggttcaattcccagtcagggccccagcgcctttggtttaatgtttgcgtggcatttgacttttttacctatttagtattggtgagattacctttggtaaaaaaaagtttaaagagtggaaatcgcaattctttgtgttggctaaaatctgattataagagatctggaaggttttatttttctttttcaaagagctctatggtcagaagtcggcttcatgaaaagctaatatttaattatatgtacatacagtctttctggattttctcttttgcctcctgttttgaaaaatatttggatttgagtgaaactccgttttagaaattaattgcttggtacaatatacccatgtaactaccctgcacatgtaccccctgaatctataataagagttgaaattttgacaaaataaaattagattttgaattaaaacaaataggtgcttggttcctctgctcacttctttttaaaaggaattcctctcccatgtacttcttcttttcccttctttaccttccttttggcatctttggtatcacatgaagggatctagagggaattttaagtgactctgaaattccttgagaaatacacaaaaagatcccactcaccccttttgggggtctcctgttctccttgtggagtccagagtcagggacaggctcctccaggtctgcagctctgctctcttttatttcatcttggctgattgctttggttttgtgagtaccaggcattactttgtactgtgagagacacgtcctttgtgagtgcaacggctgctgggtcactggtgagggctgcagtttggagatggctgagagccgttgcaataaatggttgtgattgcagggggctccttgtttctttgcaagtttagatgagaaaggtgcagtttggacacagtttaaaggctgtgaaaacaccaccaatgaatatgatttcctttggggatggtctgattaaaagtgggctgattgttgctgtgctactagccttgaagacatgtttctacagcattgtgcagtgtggaaaaattgtgtggcttggtcttgtggcatgtcccttcttttagagacctcagattcaatgtgaaattcgggatttttgattttcaaagatctagatgccctgccttccagatgtgcctactcttcacatattttaaaattagatcctataaactgcaaatactttgttggcttctgtgagatcagaggtccagttagaaaaggaagacagtttgttaaaattaaaaactatttatctaatctaactagattggcctccaaatatgactttctgacattcagctggttactctgaaaagatttctaaatctcttgaggctcatctatatgtttccttgcaaagaaaaaaaaaaaaaaaaaaaagcaagcccaagcactagtaagaaaaagatttgcaatgtttcatgaaaggagtagatgagtgaagcatttatttgtagatactgggttggatacctgtgcaaagaagaagaggtcaataataaaaattgccaggggatttcttggaacttaacaagctgaattaaatatagaaatgtcaggaaatcaaggcaggaaatactcacttgtggttaggcagacagggcagggttctgagcttgagatggagcaaacagttgtggtgggtgaagttcacatgctttagagctcagctgtcctagtaaagaagcctaagagtctctaaagctcttatgagaagatggattttttttgcctagattaaaaggttaaagaattgctttaagttggataaaataaagctaaatgtttaagcaagttgtgaaaggtttatgaaaaaattaattaaaatatttttgtgtgtaaacatattgactaaagttgaaggggtataattcagcatttctgtaaattgagcattgaaataaaaacacaatgggtttctcttagagcactaacctgctctttaacaaaaattgtaaagggttatagaaagtctataaaaatgttaccttatggtcaaacattaaaattgggtaaatatgtctatcaggttttattaagaattaggtttaacattaatagtacactaatgtaaaggtgaaatttggcttatttggtacaaaaatcatacaggaagcattgtgaaatataaaatgatttttagctttctttgggctatatttctataaatatgttattgatgagggttccaaagttatgggagactcctataattctgctatatctcagtgtacattatcagtcataattataattgtcatgttaaattattgtgggccacagaggtaacagatttccttgtcaattgtgtctttgactatgactaccctaaaacgttcagtcacccatatacacatgttaccttgttttggccctctttagaaggtaattttataatcagctataaagccctaacaggtgctcttaaatgcaaattttgataactttggagattgtgacatcagaagagaggaaaaatgttcgggacacttggagagctaaaatgttcattgatatcaagcaggacaggaattaactgcatgaagtgaactaataggaggctgaagtgatctttttgactttttgcttaaaacgttgctgatcctttgttttgcttttcagagtcaaggcaaattttcttttgagctattgacagcttttaacgattaatcaaaatatactcctatgaacaccatttggagcattatttgtttctctctacccgatttccccagaatttggaaactatttgtgggtattcttaatttatggcaatatagttatttgcataagtgcaataagaatgtgttttctttggtaacaggacacaatttgaaaaactggttattttaccaaggttttgaccagaatgctgtgctttcctttaaggaatcaaacttgacttgtggagctaataaagcctttggaaaactgaccttatatcctgtgaacacagtccctgtacagggttactgatctgtgggaagaaaagaatgtcacattctgacaggtcaggaatcccaagttatcttgaaacttcaagaggacaggaattcacccaaccatatgtatttgatggtagaaatccatggcaggggctcagctttaaaaagtcttatctcagattccttctataaaacaaagtcccattaaaaccaattttaaaagcctatgtgaaaaataattattcttgctgcacctcgtacaaataaagtggcaaagcataataaagcaaattggtcctgtcgtaatttgtctttagtaaaaacgggaaactggggtcgggtgcagtggctcactcctgtaatcccagcactttgggaggctgaggtgggcagatcatctgaggtcaggagttcaagaccagcctggccaacatggtgaaaccccatctctacaaaaatacaaaaatgagccgggcatgatggcgggtgcctgtaatcccagctactcaaggggctgaggcagggaagcggaggttacagtgagtcaagatcgtgccacttcacgacagcctgggtgacagagcaagactccatctcaacaacaacaacaaaaaagggtaactggagagagggaagttatgtttcaaaaacttttggaaactatagtacacctgtttttaaattctagtctggcattcagtttttattattttctacagtttgggttaaattcgtatttctctggctacaagtctcctaaataatcttttcatttgtttcctttttctttccctttttccccatttttcttaattggaaatcactgaaacctaagctgtgctttcttaaagccctgtgaactgaagactagacaaccgaaacttctgaaggaagtagcagcaacctatttatatgtgttgctgttgcctactattatgttttagcaggtgctgcctctacacccccgaaacagagagtgctactgggaacaaatcgactttttccactccagtgctgcattcggtgccccataacgatgaccccctctcagcaggaagtagccagaaagattacaatgctccatctccctatgattcttgtgataaataaatatacaagcatgatagaaatcatgcgcaaattgacagtggggattgtggcaggccagatttcactaatggaggtccccatcacaactacttcagtactgactgagtggttaagttcagtatcaaaagctgaaagtgccagcgcctttctacaaaggctagaatgtaacaaaagcccaccaagggttttacctaggcctttcctgggccttacagcatgacaaaacaaagaaggaattcttaaccagacctgtttaggattaaacaaatttaattgggggtctgaagaaactcgccaggcctccacaaacaagttcattgggggtctaaaggaaccccccccaaacctctgtgattgagcaggagacaaggtcagggtaattgccccagcacctggactcatttagatttaagtaaatgtactgaggctccagagaaaggtctccaagacttagactagagttacagattaaaagaagttaatcacttatatctttagataaatgcacactgacacgtagacatacatcttagaaaatatataagctctggaaaaccttgtaatttacagttggtctggagatattttctgggccttctctctgtaaccggttccagaaataaaaaactctcttcctccccagtttatctgcatctcgttattgggccgtgagaaatagcagccagaccctgagtttggtctgggaacacactggctgggcttcctgcctggcggtagagcttcactgtcctccttcccagccaaaatgtggcccttgaaggcttcctccccaactgaccggttttgggttctaggtactcagggaacaccgtcttcaaggaggccattttcatactgttcctggtttgatttttctgaaattaggaaatgccccttgaggcatccaggattgtctttatttcccctgaagcttcccctcctgaagaaaaaagttctcaaacaccctcaggactcaaaccccaagttcaccctgtgaaacattcccatttcctaaacccaggcaggctcatggccctcagcctctcagaccccatggaaacctcctcccccacttcacgggttctctccatattgagagcctcccctcctcggcacacaacccagagactcaccccaacatgtgtagcaaatcaccctggaaacaatcatggctgaacgtggtagcccatgcctgtaatcccagcactttgggaggcccaggaggtggatcacctgaggtcgggagttcgagaccagcgaggccaacatggtgaaacctcgactctactaaaaatacaaagttcactgggcattgtggtgtgtacctgtaatctcaactactcaggaggctgaggcaggagaatcacttaaacctgggagacagagattgcagagagccaagatcgcaccattacactccagcctgggcaagaagagtgaaactacatctaaaaaaaaaaaaaaaaaaaggaaaaggaaaagaaaaaaaaaatcatgaggcaacattgcatttaacaatattttatttatcaaaagacacttgtctttctcaggtaagtgaaggtctagagatgaaacgagtcccgatgtaaattgccccatgggcattgctgagatcacaagatcatcactgcagcatgcagcacaatagtaaatttctcaggatggaagttcaacaatccaaaaggtagtattttttttcatgatgctcagtccatcatacgaaataaaaataaattccttttcatgatcatccattcagtagaaaaaatgatagtaaatttgttctcatgaagatttttaccgtaacatataggatttatcgttattattattattctttgttttttgtttttttgaagcggagtctcactctgttacccagtctggagtgcagtcgtgcgatctgggcacactattaacctccacctccagggttcaagcatttctcctgcctcagcttcccgagtagctgggattacaggcatgcgccaccacacccggctaattttcgtatttttactagagatggggtttcaccgcattggtcgagctggatttgagctccggacctcgggtcatccgcccatctcagcctcccaaagtgctgggattacaggcgtgagccaccgcgcccggcctcaatttatcattattcacgcatccacaaactgggttcttatattttgtacgtgattttttccattgaggagagatatctgtgcatattcatgctgctcatatttcatccacaaactcggttcatatttcatccacaaacataattttttccgttgagaagagatacttgtacatatttatgctgttcaaattcacatttcatcattcttttacaagaaatagataatgtattttaaggttttccagtggtattacagatattttactgggtgtatagatagaaattaaaccaaacttctttgttctggccgccagtcatgcatcctgttttcaacatagttcacatacaactggttgtgtaaaaatgaaattattttgtttagtacaatcatcaacagttggttgattagatttttaattatcaagttaatcattgtcattatgcttctcatcgcactcgtcattaattgctgtgggaggaaatttgttatgttccctatgagagggtgtatcacaaattcaaataagaattcaacgacaatggactgtataaaggaaataagcaagtccatggaaaacatatttttttccggaaaggattaaaatatttttaaaaaggaattaaaaaaaaattgggcacggtggcaaatgcctagagtcccagctgctcaggagatggagacagaaggattgcttgagcccaggaataagttggaggctgtagtgaacagtgattccaccactgtactccagccagggcaatagagggaaaccctctttctaaaaagacaaaaagaaacaaaacaaaacaaaaaaacaccacatcaaaaaacccaacaacaaaatgaaaaaccaaataacagcaatacaattggagctattcgatccaaagaagtaaatgaaacataaagcaaataaaagagaaaagctaatacctgtgtcctgcaggactcagtccaagttctgctctgactccctcctggtgagccaccccttaaaaagtcacttggggcggggttactttgacagacagtcttctgtcaaagagggaggcggtaaatagcacttttttttttttaatttaacgcctttccaacaaattagcggctatgttgtctaagagtgcaaatgtcagaggtgggtacaggcagcaagaccctccccacaggggcagcagaaggaggaatgactaagggaacaagactttagtgtgctcaactacacaggacaggaaacagatgctttttacaaaagctggtggacttgaaggcagaatattttcaagttcctgtaactgcgaactatgacctgtagcctgtgagagtgactttctgtggcaaaggagcttttgtgaatgtgaggaagttaattatcttaacagtgggaggttctcccggcttatctagctagaccctcgtgaaatcccaagtgtccttaggaaggggaagcagagagagatttgagtccagaagaggaagaaggtgatgtgaggcccagtaggggaacaaagggcgatggcatgtaaacacttagcccccagaagtgggagagggctggggttcatcacaccagaatccctaacaatcagccttattttaattacccttgaaatggaaggaggccttagagagccagaggcttggaggggcaccctctgctgcatacacagatcccaactgctgtgggctccaaataattgcaccagggaaatcacaaattatcaaaaataaaggatgtaaagcttttaaaaaatattaaaagcccaacaaataaaaaaagttctaaatctataaaattgacctcagtctgtatatttagatgagtcatgtgtatatagcgtttcacttcaaaatatatgataaatctctcattcattggcttaaaaataaacacttcaatcaagtctttatcagaaaaattgaaacgttaactcaattgccttttagttcatgtgactttacaaaacttaaaacaataaagtcagttttaaaaattattagtaaagtaaaagaaaaatatcttcacaatgtagacattttgtccacatgagacatgtgaaatattgccattactaaatatttgcaggtcaaaaactgtttccaaaacattttaaataatcatctggcctgtctgttttagagcattcaattctagctgaggtctggggacatgtgaaaggagccacggcccgactccgtgctgggaagagtcagacattttccacagctctgtcctttgctgtgggctctgcaactcctaccaattaaaattgcttacgtttttgttttatttttactaaagaggggttcctaaaagctaacattatactgagtatatgtaactaaaactactaagaaaacaatttcacaattatacaaatgtgccaagtaaatgaaaaaataaactgtattttaataaaggttataaaaagaaaaacatatagtggtgtgaggactgtctcaggtcttcactgagcaagggatcatgacattctatggcggacagctgaccttggctttctgctcctcttgattatgtctactaagtgacatacttactctttttccacctgtcttgcctctaagggtaacaggttttatgagatccctcctagtgctttgcaggtcagcctccctttgctgcattccaattttactgcctataccctccagctggcttttgatgacaaaagtcctggtcccagccattctcagattctgtcatccccgtgggcactatggagctcagcactatgggaggttccccaaaaatctcgttttctatgaggaatggccaccacctgcatctcagtgatgctagtgacccctttcctactcctgtgctcactggtcctcatgaagatcctggttggtctgtagccccctatttttcctattaaagagaaattacagtaagacccatttgtgtgcaaaatcaattttaggcttattacacttggcctgataatttgcataaaatgcagcaagaattcatcggccatataggctacttttgagttaattttcctgggtttttacctaaaaatatactattttggttagagtcttgtgaaaataaccaatgtgttcaattgttttattttaaaaggctcttactgaacactataaatatgtataagttgaatatacaaactatattgtcataaaatcacaacccaaaatgtggagaacgcagagggaaaggtaaatttgctcgcaaaaacatacttcacccaaataactggaaaaaaaaaaagactttcatgacccttctttaaccagagcagcagctttcaaacaaggtgtttgccttggaaatgccattcacaagccaaacggcccttgagagctgtctgtcaggcactgtagaatctagcagctcctcacagagttagaaatagtttcaggaaagagattccctgcttttagtaactgcactttatattcccagatagcgagattgtatgtaaaccatttttatcttattctggaactcttttgggtactttttttttttttttttaaatgatggagtctggctctgttgctcaggctggggtgtagtggtgcgatttcagggtatgagaaaatgcagctggacctggctctttccaggaagaccctcacagccaaggagtccaaagcctggggttttcatctaattccagtgtgactggggtaggagcagctttggtgctgggtgtgtgtgtgtgtgtgtgtgtgtgtgtgtgtgtctatgcctgtgtctgtttagggtgttaggctcgtggttgtctagatacaaatgtcccagggctcaggagccccagggttatgtcaggggcaccagatgaaggtgtcaacagaagttagggcacaagggacaaaggtgagagcaaggttagattcatttaggtgcaagaaatcatagagggaggagggagaggaagccctcctgctaccaccgaggaagaagcgcagcttaaggcagaaagcctgtccggagaggaagtgagtttgagggcagggctctctgggtaaagtacggtctgggacaccagcctgggggaagggtacagaatgcagagtggcctggcgtggggactaagaacagaggagagcagctttcactgggagggtcagtgttttcagtgtccagcactgagcaaggtgagatttgggcagcttgctgtgaaataaggtcaggctctggcattgtccccattgcgtgtgtgtgtgaggggcactttgggagagtgaactctccacctccatcctctcatacgtccttcaaccgagcttgccagttaccctgattccaaggagatctatttattgttgacaatactggatcctagcagaggctgggtaggagcctgggcacaagcaagtggaggagggggcctgggcctgaaagacctgggaggtttgagagaggacacagcccacagaatggagcagatggggtagagtcggcaagcattcagggctcctagtaagttggacaatggagaccctgaaagatccagtaaaacggggagaacaaacaggtccccaactcacatccttgcagtgcctggagcttcagactccagacaggtggggaaggaaaattgagggatgtgaacatgttggagaatgtcgtgccctgaagaatgaagaaaaggggggtgaggaatgagagcaggaacggcttccagtgcctggtgcccaggagaactcagaaaatgggtgtggtggagaggaatcgaggaaccggaagtggtggaagtgtgcagggcccctccgagatcactgtgactgccaggcgtcctccctggctggagagcttcactgtcctccttcccagccaaaatgtgtcccttgaaagcttcctccccaatggactggttctgggtcctatatatttgaaggggtggcctgcctctccacacctgtgggtatttctagttgggtgggaggagagacagagaaaagaaataagacacagagacaaagtataaagaaacaacagtgggtccaggggaccagcactcagcacaccaagggcctgcaccggcaccggcctctgagtttcctcagtttttattgattattattttcattatttcagcaaaaaggaatgtagtaggagagcagggtgataataaggagaaggtcaatgaaaaacatgtgagcaaaagaatctatatcataattaagttcaagggaaagtactatgcctggacgtgcactcaggccagatttatgtttctctccacccaaacatctcagtggagtaaagaataacaaggcagtattactgcaaacatgtctcacctcccgccacagggcagcttttctcctatctcagagttgaacaaatgtacaattgggttttacaccgagacattcagttctgaggggcaagcaggagacagtggccttcctccatctcgactgcaagaggctttcctcttttactaatccacctcagcacagaccctttatgggtgttgggctgggggacagtcaggtccttctcatcccatgaggccatatttcagactatcacatggggagaaaccttggacaataccccgctttcaagggcagaggtccctgcggctttccacagtgtattgtgcccctggtttattgagactagagaatggcaatgacctttaccaagtatactgcttgtaaatattttgttaacaaggcacatcctgcacagccctaggtcccttaaaccttgatttcatacaacacatgtttttgtgagctccaagttgggtcaaagtggctgggtcaaagtggctggggcaaagctacaaattaacaacatctcagcaaagccattgttcaaagtacaggtctttttcaaaatggagtctcttatgtctttcctttctacatggacacagtgacagtctgatctctctttcctttccctacatatattcatggaccacagtcttcaaggagtccatttcctcactgtttttggtttgatttctctgaaattaggaaatgccccattgaggcacccaggattgtctttacttcccccagagcttccactcctgaggcaggagcttctcaaacaccccccaagactcaacacctaatttcaccctctgaaaccttcccatttcttaaatccaggcagggtcatggtccttagcccctcagatgctgtggagaccttctttccctttcatacattctctcaagattaaaagccacccctcctcagcacacaccccagagactcaccccaacatgcattgcaaatcaccctggaaacagtcataagaccacactcatttaataatattttatttatcaaaagacactctttctcaggtaagtgaagttctggagaggaaaagaggagtcctgatgtaaattgccctgcaggccttgctgagatcacaaggagattgttactgcagcttgtagcacaatagtaaatttcttctctggatggaagttcaacaatccagatcgtagtatattccttttcattatgctcagtccagcaaatgtgatgataacaaattccttttcatgatcatccattcagcagagaaaatgtttgtaaatgtgttttcatgaagatgtttaccataacatacaggatttaccattatcaatgcatccacaaactctgctgttgttttttatacataattttttccatcgagaagtgatagttgtacatattcatgctgttcatatttcaaccacaaactctgctggtttttttatacgtaattttttccattgagaagtgatacttgtacatatttgtgctgttcatatttcatgtttcatcatccttttacaataaataggttatattgtattttaagtttttctaactgtagtgcagaaattgtactgggtgtatacatagatatcaaaccaaatttacttgttctggctgataatgcatcatttatttcatagattatgtatttctttgacacatttcacgtacaactaattgcataaaaatgaattttcttttagtatagacatcagcatgtgcttaattcggaatttaattgttgagttaaacatcgtcattgccttttccgttgttattaattgctctggtgggaattttgttatctcatacataagacagtgtgccacaatatctcttaaaatttcaatggcaataaactttatatttaaaaacagggaatctatggaaaacacatttttttctaaaggattaaaatatttttttaaaataattttctaaaaagttaggcacggtagcaaacgtctagagtcccagctactcaggaggctgagacaggaggattgcttaagcctacgagttgggggctgcagtgaactgtgattgcaccactacattccagccagggcaatagaagttaaccctttttctaaaaaaaaaaaaaaaagaaagaaagaaagaaaaaaagcaacaacaccaaaacctcaccaacaaaatggtaaagaaaaaaaaaacagcaatacaatgtaagctatttgatccaaagaagtcaatgaaatttaaaacaaatgaaagggaaaaagtaatacttgagtcctgcaggactcagtccaagttctgctgtgcctccctcacggtgagccacccctttagaagtcacttgggtcataagttaacccgataggaagtgtcctggccaatgaactagggaggtggtaaatggcaccattttaaatttaaattcacggccttttcaacggatcagtagccatgttgggtaagagtgcaaatgtcagaggtgaaaagaggcagcaggaccctcccctagtgcttgggcaacagaaggtggaatcactaaggggacaagactttagcatgctcaagtacacaggacagaaaacatgctttttacaaaagctggtaaatatgaagagggaacattttcaagttcctgtaaccaagaactaccgcctgtaaccggtgaaagtgactttctatggcaaaagcgtttttgaaaaggtgaggaagttaaatatcttaatgttgggaggttcttctggtttatctggctagaccctaatggaatcccaagtgtccttatggagcggggagcagagagagagatttgagtccagacgaggaagaaggtgatgtgagtctgggtgcgggacagggggagaatgatgctatgtggggatctgggctggggaatgacttagctgcatgagcggagtgacttagactcctgaactagaagaaatctagggctcatcacctcagcagccctaaccatcaaccttatttttattacaggtcttccatcgacggactccctaaaaagccagcggcgtggaggggcgccctctattggacaaatagatcttgactactttcggccctcaaatagcctgactaggcaaataacaaataataataatttttttttaaatcatggaaaatattttaaaaaacaattaaaaagttataaatctataaaatctgcttctgtctgtgtgtctgtatatttagatgtctcatgtgtacataatgtttcactaccaaaatatatgatgaaaccctcattaatcggcttagaaaactaaacacctaaatattttctcagaaaatacaaaaactttaactcaaatcccttttaattcacctgactttaaaaatctttaaaaaataaagcatgctttaaaattattagtaaagtaaaattagaacatcttcagaatttagacatttggtttaaattatacaggtcaaatactgcccttagtaaatattttcaggtcataaacaactcctgtaatcttttaaataattgaattacatgtctgttttagagctttaagttctagctaaagcctggggacaaatgaagggcaccatgccccctctctgtgctggaaagagacattttctacagctctgacccttgcagtaggctttgcaactgctacctatcaaaattgcctacatcctaagtttattattaaaaggagttgcttggagttaacattataatgaatatatgtaactaaaactatttctcatacaaagtatatgaaaaagtagaatgtatttttaataaaaagttataaaaagacatgaacatgtagtttttataaaaaacagtaattttgtctagttttgcagttctaaaaagttatgttaaattcaaaaataaaaaataacaagacaagactcaaggtttaaataagttgtaaaagatttgtaaaaattagttctataaaaattttacaaaaaaaagcattggttaaaatttaaggaattattttgtttttacagaaattaaacattcattaaaaacactctgatacaaggccttaatttgggttcatgtatcagaatagcagggttttcttagaatattaatctattctttaaaagaactatgaatgttatgcaaactttataaaaatcttaccttagagtcaaactgattaaaattccatagattttacgtaaaattttattaaaaattaacttcaacaaaaataaaatttgattttctcctttaaacaaaagttttgcgtaatattaaataataaagcatttttgtttaccttttaaactataaacacacacacacatacacatacaccaacactaaagtcagctgacctcatactgtctttattggatattcttgtttaaaaaactatcttctttggaaaataaagttttttattttaaaccatattttaaattatcattttgactaaatccataacatacagtgatctgtaataattctattttataatatcaagtgttttgaagaactccaggaacagccatgagagaacactgtggtttagtaacactttatttcctcagtttgaaaatagttgtctttcttggggaggccggtttcagcagatgaaaacaagagtcatgatgaaaattacccagcagtggttagtgtgaccataggaacattgtcatcaggtcagcagaaaacatatcagcaaatttttctcatactggcagtgtgtaggggtggatgtttacagttcctgaagccccagtggtcgtgtggtcttttagttttgccatttataggcaacttgtggtaactagctcaattagacacattccttatcacaaggacagagggctttctgtatcctagggttcttgccttggcattccagaagaatcaggtcacacgtggacgtggagaatgagtgcaaggttttattgagtggaagtagctctcagcagatgggggagccagaaaggagattggtttctccctggattggggccgttcagcagccctggctctcctctgactgccccaggcaaaatccacatcgttctataagtcggtgccctgctggtgtgctggtgcctgttgtcatgttcctcttcatgtccagccgcctgtgtgttcctccgctgatgtgctcctctcgacgtcaagcctcctgtgtgtctgactgctagggtcttggggtttttataagcacaggatgggtcttagcaggccaggatgatcttgggaaagacaacattcggtcaggaaaacaaaaatgcctgttgtcatctaggtccgtggggacaagcccaggtgtggagcttttagccagggaccacagcctcctgtatccaacacttcccttcaccttttctatatcattcaaagggatcatgcccttcccatcccagcacttcactttcatgtcatttgccccctctgaagaggtacatctaactgccattagaatatggatgatgaccagtcttagctgcttcctgctgaaagggggcattgttttgggggaaaacggcagtcagattcctcccaggggtctctataataaaagatcgaggtggctactttcaggaggtcctctaatgtactatctggtcccaagtcccatttctgcaacctcctcctgatgtcaggagctgcctgagtaataattttatcctttaggattatctgtccctcgattgaattaggagatagagaggtgtgatttaccaaggcctctcttagcctctccaggaaggcagtgggattttcatcaaatccctggttaattatggacaacttagtataattgagaggcttggtcttagacctacgtaagccctctattatgcacacctgaaagtgtctcctcttccagtcttccatctcattattgggatcccatttagggtccttcactggtgctacttctcttccagttggataatattcgctcccttccctgatgctataggtgatgcaaagctcatccccaaatctctctgctgctggcagagcagcctgcttctcagtgtctatcaggttctgactcaaaagtaacataacgtctctccaggagagttcaaatgttagggtgaaattctggaaagcttctatatatctatcagggtcatctgaacacttgcccagatctcccttaatttgctttaagtcttgtagggaaaagaggacttggaccttactgggcccaaattcactgggcatctgtaggaggggcaagagtgagactgggcttgtttgggatgaagatttctaggaggggccaggtgagaggctgaagctggatacggaggttggggtggacccagaggagcagggcttgagggagctggcacgtcagctgggggtgcgtctgggactcgtgtctttaattccctgggcttgaccctggcagccttccccgagacagcaaacaggagggctggaacaatcctacatgtcagcaaaggtctggattgctttgcaaggtatagaaagcctgcacatttggggcctcagaccatgtgtcctcacatccagagaaaagttctaattgcaggatggtattgaaatgaatggtcccttcctgaagccaagccagtccttcctgtaaaccataatttggccaaacctatgtgcggagggctatgagatgcttttcctctggattctgagggtcaaaacagtcccaatggttcaggatacactcaaggggagtacaagctgggggtggtgaggagaactggctgcccattctgaaagacagggaatagaggtgttcctcatttcccttccttcttttggcaaaaagctcagggtgtgatggggagggaaagcaagcatcttcacttcactttccacctcttacccctgcgccctggcaaccttggcaggtgccggccacaggtacaaatgcggtatgtacccatgaagcagggagaacctggagattaggaattaactgccctcacctatgtttccttttctccctgctgttgaaaaactttgagttccctgggcctttttatcccatgaggcatggcctccttctgtgggatggggttcagtcagcaggaattggtcctgtccatttacattgtgcctgttgcctggctttgaattcctcagacctgctttctctttctagggcctcagcctgaagcttggaattgagtttgggactgaaaaagcatttcagaggctgtttatatccatttagtgcctcaaataagccctgctgaatttgcaattatcagccagcaggggtcactcctctgttaacttccctattagaaacagagcggtggggattctcacttagaaaagaaaaaaagagaaaaacagttaaagaggcaaaaagtggggaatgctgggggaagaaccccttgcttagtgcaagtgggcccctctaatccttataactttcccatccttcccccagttcagaccaggttgaattccttggccatggaaggaaaggttccattgatgcagtgggtgagaagcactctgtagggtcctggctaccatcggttttctcacacccccctcatcccaggcagtggagggagacacttctgcgacattgctccccctgccccttcatggctattgggtgtggcctttgcctgctgcaggcatgcctaggtgctggagctgggagggaaaagggtaaggagaggtgccctggaagccgctcatgcctggggctgtcaaggtggaggcatacatggcacctctaggaaaaattggtctgatttgcacctttggcggctgagccaaatgctcattttacttagtaacattgcctcagcctgtagcaaaactcttaacattataaaggaagagataagatccatttcaaataatgtgtgagagagaaaagagatgaaaggaaaacagagtcttttacctgcaggaaagggagagaagtggcagagttttggaagaaaggcaggcccaacagtttcccattcactcacactcaccttccgagatcccagacgagccaccagttgaaatgggaaaagtttccttgtccccctcacaggaggtggagtgggggtgtggcttgcttctttagtactccgctgctcaaacctctagggaagcatacagactggcaagttgtggggctacaaccccatggcagcatctaggggtagatgtttacagctgctgaagccccagtggacatgtggtaccatgtgctcttttagttttgccatctataggtggctttgtggtaaccagctcaattagacccattccttaacccaaagacagagggctttctgtatcccgcggttgttacctaggtgtaccagaaaaatcaaatcacacgtggtcttggagaatgagtgcaaggttttattgagtggaagtagctctcagcagatgggggagccaaaagggagaatagttttcccctgaagtcgggttattcagcggcccaggctctcctctggctgccccagccaaactctatgtcaatccattggtcggtggcctgccagagtgctggtgcctgttggtggattcctctcagcgtcgagagtttttccctctcaggaaagggagagaagtggcagccacccatgtgttcttgcactgatgtgctcctctcgacgtccaacctcctgtgtgtctgcctgctagggtcccagagtttttttaggcacaggatagggcatggtgggccagggtgatcttgggaaatgcaacatttggtcaggaaaacaaaaatgcctgtcctcatctaggtccaggggcacaagcccaggtttggagccctagccagggaccccggcctcctctacccatcactttccttcaccttttctgtatcattcaaagggaccatgcccttcccttcccagcacttctcttctgtatcaataggtgatgtttttaaaatttcccaactctagtgcaggcatggtactagacatatacatagaaataaaaccacacttattcttctggctggcaagacatagtatttttgccaaattatgtgttgttttgaagcattttatgtacccctggtcatataaaaataaagctattttgttcagtacaaacagcagcattttctggattagaaagttaatcatcttaaaagatcatcacggatttttccattgcactcatcactaattgctttggcaaaaaatttcttatctcacgcatgacaaaatcagccgcagtatctcctagtaatttaatggtgatgatctttataaaggaaataagcacatcaagggaaaacataattttttttaaaaaaagagtaataaaactttttaaaagtcttttttaaaagactgcttttctaaaatagtaaaataaaactccaccaataaaaccaccaacaaaacagaaaagaaaaaataatgatatgatcggagctatttgatgaaagatggtaaattaaatttaaaatgattagaagagaaaaagcaatacctgtctcccgtaggtctcagtccaggttctgctatgcctttctcctggtgagccacctatttaagagtcgcttaaagcatatgttaatccaacaacagcagattaaaaaccaatgcaatctgaactatttgatctaaaaacataaataaaatttaaaacaaataaaagagaaaaagcagtacctgtgtcctgtaggtctcagtccaagatctgctctgactcccttgtggtgagttagccctttagaagtcacttggggtggggcatatgttaattccactaacattggttctggccaatgagtcaggaaggtggtaaatggcaccttttcttcttgctgatttctttcagttcctttggagtctggacattagtcctttgtcagatgcctagtttgtgactactgtttcctatactgtgggttgtgtgtttaccctgctgatatttcttctgccttgcagaagattttcggtttcattaggtcctattgatcttattctatttttatatttttgcgtttgcttttggggcattagtcatgactacttggcctaagccaatgtctagaaaagctttttggatgctatcttgtagcatttttagactttcaggtcttagatggaagtttttatatgctttgttaaagatcaggtgactgaaagtaccgggctttgtttctcggttctctattctgttccattgctctatgtgcctatttttatacttcctgcaccatttattgaataaagtgtcctttccccaattagtgtttttgcatactttgttgaagattagttgtctgtaagcatttggctttatttctgggttctctattctgttccattgctctatgtgcctatttttatacttcctgcaccatttattgaataaagtatcctttccccaattaatgtttttgtgtactttgttgaagattagttgtctgtaagcatttggctttatttctgggttctctattctgttctattgctctatgtgcatattttataccagtatcatgctattttggtgattgtagccttgtagtataatttaaagcctgccttcagatttgttctttttgcaaagtattgctttggatatgcggtcacgtttttggttttgtataaattttaggattcttttttctagttctgggaaggagaatgatgatattttgatgagaattctactgctctgtagatggctttggagagtatggtcactttcacaatattgattctacctattcataagcttataatgtgttcccatttgtttgtgtcaactgtgatttctttcagcactattttgtagttttccttgtaggaaacttacattaacctacttggttaagtatatttctaagtattttacttattaaaaattctcagggaaatgcaaagtaaaactgaggtgggaaattaaagaaaaataaaattaaaaagaaagggaaataagctttcttgtattaagctaacttgtcccagaggcagcaacaggcacagcccagacccaggaaaagtcttgataatattatttattgtattctggagactcttccagcactccttcaatgtagggagaagaaaaacaaattttcctttgttttatggtatgagtttatagattcttgttctctttaactagtaacttcaagtattctgttttatctaagaagtatggcaaaggtcatgagaagcctgagcaggcctgaactacagctctctaggcaccatagtgaagataaaccaatgcaagcctctttagagcaaaacctagataatagacatctgggttgcatagcaacagttatgtgcaatcctgagttatgaacctgttacaatttgattaactgtctttttcctgcctctgtatccctgctttcacaccactgtaagcttgcttcaagctggcccacccccttttgtgaagtgtgtataaaagtcaagtgctgtctttgttccaggccctgtctttggacgtgagtctgctgggcctgagagcactcaataaaagattctcctgttttaacccaaagcctctctctcatcctcctaaatcccacaacaaaaccacaatgagatgctatcttaatcttgctagaagcccataatttaaaagtcagaaaacaatagatgttggcatagatgtggtcaaaagggagcactttgacactgctagtgggaatttaaactagtccgaccactatggtaaacagtatggggattccttaaagaactaaaagtagaccattcattccagcaatcccattactggctatctacccaaaggaaaagaagttattccataaaaaagacacaagaatatggatgtttatagcagccgattcgcaattgcagtgatatgggaccaacttaagtgcccatcaacgaacgagtggataaagcaaatgtggtacaccatggaataatacttgataataaaaaggaacaaaataatgtcctttgcaacaagttggatggaactggaagccattattctaagtgaagtaactgaggaatggcaaatcaaatattgaatgttttcacttttaaatgagagttaagctatgagaatgcaaaggcataagaatgatataatggacttggggactcagggggaaaggttgggagggggatgaggaataaatgatgacatattgggtatattatacactgctcaggagacagatgcctcaaaatctcagaaattaccactaaggaacttttatccacataaccaaaaaccacatatattccacacactattgaaagaaacataaacattattttaaaaaataaagccacttttaaaattagcaaaataaaataaatatgtcttcagagtttagatattggatccaaattagacagatcaaatactgcctttactaaatattttcatgtcattaacaacttctaaaacctttcaaacagttttttgacatgtcttggaaccatccatttctagctaaggcctgggcacctgtgaaatagggccatgcccccccttatactgggaagagtaagatatttcaagactaagatgttttctacagctccatctttttctttaagctctacatcaaggacataattaaaattggttgtctcctaagtggtttactaaaaatgcatacttaagagttaccattataattaatatttgtatctaaagctacttaaaaattttcacacacaaatctgactgaacaagtaaaatatattttaagtcaaagtttataaaaggacatgagaacatagcttttatgaaaaaattagttttgtcaagtttagaggttttcaaatattttaaattcaggaaataaaataacaaaaagacaaaagaaaatggttgaacaacttagaaaaggtttgttaaaattcatcttataaaacaatctacatgtaaaaagtgggctaaaatttgaaagagattatttaggttttccataaattaatccagaaggggtaggaagtcttaagaatgaggaaggacaggaggaaggggaggtcatcctgacactgcagaggcagaagtgcagctgaaggtatgaaggctaagaggggaggggagtttgagtgctgctgcctggctgtcagagcagaggagggtcctgggcaccagacttgaggaagggatgaaaatgctgggcagacctgtagtgggcccttgagatggcagatagtggtttccagagagagggccattgttttccagtgcccagcactgagcagagagagttttgggcagtgtaaaaaaaaaaagagaacttacctctttctcgttttagaaaaagaacagtctaagaatatcagcagggaaactctcagtgcttcaaggggttaaacgcccttttggctttcttgtgttggtttcatcatagaggaggagaaacttcttggaagtgttcctaaaaacacaacacgtctgcttctcctttcaaaaaaggaagtgctaaaacacgaacactctagatccaaatattaatacggatgtctaaatgcttccgttttccaaggggcagaaagctaaaggttgtaacctattcatttcagtcaaagttggtgaaagggaagcaaaggaactgggtggggcttggaaggatgacgaagctcaagctcattggccagcaacctctctcctgggggcgggaggggtgagcatacgtcattgctttggcttctataaaatgaggaggactcaccgagtgtgaagagtccttctggtgattgcagctgagagcacactcacgacgttctgcaaggattctctgattatgattctgaagggaaaagcgatggaatggacagcagagattgtaattttctttatcttgaattacggaagaaagtatctaggacagaaatccacgacaagtccttggaaccagcagatctcttcgttcacggagacgttgacgtattctctattgaagaagattcttaccttcttactggacaaggttttgtcagttctgcgtgactggattgtccgggagactctgaggaaactgatgtcacatgtttttccaaagaagatgtttctggaaccaacaactgtgattgtggtttgaggacttctgagagttccagtacaggaaataagcagaacatcagctggaggctaaacggatccagacttcactcttcacttcccttcctattcagtctattgtgcctgctgactgagaagcttggctggtatgtgagcaaataaacggaactattcagaaggagatgttgacatattctgtattgaagaagatccttatcttctcacctgacaaggttttgtcagttctgtgtgactggattgtccggaagactctgaggaaactgatgtcacatgtttttccaaagaagatgtttctggaaccaacaactgtgattgtggtttgaggacgcctgggagttccggtatgcgaaataagcagaacatcagctggcggctgaagggatgcagcctccactcttcacttcccttgccattccatctattgtgtctgcctgactgagaagcttggctggtatgtgaggaaataaacggaattataaacaaggagattgtttctcatctacttcattctgttgtggcttttctattttggggttcagggtgtgtgacaaggaccaaggagatgaaaggtttcatgatggagaaagcccaggcaatcagattgaagagctatccacagggaatcttggctgctgaggggctgcaccctgcaacggactgaccatatgacagaaaagggttttaaaggctcaacttctggactgagaacccagagtaatttgggaacctcctctgtgaggagatatgaaagctgggaatcatgacatccctaggaatggaaggcacatttcctgatggaaggggtgctttggaaaacaggagcagagtagacacagcagccttgtggatacgggtgggcagcatgcatgggtgatgtgaacgtggagtgtttgtgatcgaaactcaaaatgtctgacaaagtgaaaacctagaaaccacaatgaggaggaagagtttgtgagggcaatcactctccccatgtgtgaaaatcgggggctcttaaaatctcatctggagaggtgcagtctaccaaactctgggactttagcctccccttttaaaaaaccgtgcatcaataccaacgtccgaaaccacagaaataacacctggcttgcatggagacaaggacaaaaagccgtcatgatgagttgttctgctcacttgctgcctctgttcagtgcacaggatattgtccacccactagcaggctactgcaagagaagtgtgcaatatgttccctatgtgccatatatgtgccatatggcccatatgacaactgagtcagaaaatatctgatgccctcagagttacactccacctggagcttgcccccagccatccaggacctaggctccctaccctgtccaattttctggtgttttgggggcttcattctctaaggtgtgcccactctttactcaaaccaaaacacccacatattcctgcccatgaacaaccaatcaaccacttctcagttccacatcctgctgttgggtctctagtggtgacactgtaactcccaggtcatagtggtgacactataacacctagctaaattgatgccttgtctctaggaggccatgggctcctgcaggtctcatctgactctctgtagccttccctgacaatgctcacaatacccaagccagagccacattgacagcaagctgctctcatcttacctttgccagacctggccactggaaaaggctgaccctcatcctgcaatgcctatacctccaacctttgtctcaagctggtgtcctggagggacttctaagcagaaaacagattcagactcccatcctctcctgaatggcctcatatccaattctcagaccctcagccttcattgtaaggacacttcatccatgcccttgagtattctgtctgcactgtgtattctgcaatagattctcctccctctgcgaccctcaactccttccgcagactttttgttttcttgatcatctaccatagtcttccactgggacactgccaagcccattctggagagtgagttgtgcaagtacactgccccccatctacctttcgggaggtgtatacacccttctttctcccaggtctggaggctttctattttcatcctgaggcatctccacctgctcttggattcttcaaattgacaaccaccagttaacaagaactatgtgtcaccaaatagccaaacaatggcaattacaaaaataaaattaatagctgtaacccccattagcaaggatacacaaatcaaatcagggatagtgggtgaggaagtctgcctaacattcaaggaaggattctgaagtgatacaaaatcattgcctttgctatctttagaatggacactttcagccaggcacagttgctcagcctgtaatcccagcactctgagagccccagttgggtggatcacttgaggccagcagcttgagaccaccctgggcaatgtgcagaaaccccaactctactaaaaatacaaaaatagccagttattgtggcacatgcctgtaatcccaactccttgggaggctgaggcacaagaatcacttgaatctgggagccagagtttgtaatgagcgaagatcatgccactgcactctagcctaggcattagagtgataatctgtctgtggaaaataaaaacattcctcttcaaagttttcttctttaaatcataaatgttggaattaatatatcctctttgaaactcactttcttcaagcttctttatttgatggtagtaaatctttgttaagctttatgaggcaagagtaatggaagaagcatattatatatatttatactctaacctcagtgcttgttctagcaagctcaggcatgcgtgaatgtgcccaggcatgttccagcccataccttatatcctttccttattgggaaatgctgttactcctataagcattcttgtaagcaacttcctctttttctttgtctccactatctttacctattgaggacagttttaggttcttagccagttggatgtagcatagactgtgaggtccaaccccagccaatggagatagcacacagcagtagcgacctcatgcttaacagataaatattcctgtctccctttgtttggggtgctctcagctgatgagcaacaccctttctaaagaaattaaagttgtcttgctgagaaaacttttggtctaaatgctgattcttccttgcagcactgaagaagaagcaattatttccaacactttctcatacacaaaaaaagaagaaggtggaagaaaactttcttgtgcaccctatccctcactcagaaagacaacagaaggctcctagtggcaagccctagaggattcatttcttttgggaaccctcttggctgggatactaggactcaggtcaaactcagcattttcagtgtgtgggaagtgtgcttgggtttcactgttacttccaataatgtgatttggtccttggggttcaccaaattttggtatggagtggtgaaccctgttaagtttaagtgtctataaaattaacaaagcaaaataaccattctgccccatggttcagagaccaaatattgtgtaggaaatgctttagcgagagaaacagagaagaataaaaaatgtcctcaagcgctgcattatttcttgttatcgtccagatcttagaggaaaggctttcattttccctcattcagtatgatattagctgtgcatctgtcatttatggcttttattatgttggggtatgttccctgtgtatgtagttttttcagggtttttgttatgaagtgatgttgaactttatcaaacgtttttcagtttcagttgaaacgatcatatgctttttgtccttcattctcttgatatgatgcatcatgttgatgatttccatatggtgcactgtccttgcatcctgggcatgaattccacttgatcatgacaaatgaatttttaatgcattcttgaattccgtttgctggtattttgttgaggatttttgcatcaatattcatcagagatattggcctgcagtttctttttttttcttttttctttgttttgttgtttgtttgtttgtttgttttgatgtgtctatgtctggttttggtatctgggtagtagtgttccatccccttttattttttagaataatttgaataagactggtgttggttctttaaatatttggtagaattccgaagtgaagtcattgggccccgggcttttctttagtggaaggctgtttattatggcttcaatctcgttacttattattggtctattcatgttttgaatttgttccttatttaatcttggtaggctgtgtgtatctaggaatttgtccatttcttttagattttcaaatttattggcacataattgcccattgtagcctctaatcgtcatttgagttcctgcagtaccaattataatgtctccttcttcatttttgattgtatttatttggatcctgcccctttttttcttacttaggctgcctaataatttcttaattttgttgaactttttcttttgtttgtctcgctctgccaccaggctggagtgtagtggtgtgatcttggctcactggaacctccgtctcccaggttcaagcaattctcctgcctcaccctcccaaatagctgggactacaggcaagtgccaccactcccagctaatttttgtatttttagtagacacgggttttcaccatgttggccaggatggtctcgatctcttgacttcataatccacctgcctcagcctcccaaagtgctgggattacaggcatgagccactgcgcccagcctaattttgtttaaattttcaagaaatcaacttcttctttcattgatttctgtattttttatttccattttatttatttaaactctaagctttattctatcttcttctcattttagctttggtatgcttattgcctctctagctctttaatgtgcattgttagattgtttatttgaagttcttcctctctacaccataagacgtaagcatgtcctcattatgtcataagatgtaaccacttacagctataaacttccttcttagttctgcttttgctgtatctcataggctttgttatgttgtgtttccattatcaattgtgtcagaaatttttcaatatttttcttaatttcttcattgagcaactgatcatttgggagcatatttttaaacttccatgtacttacatagtttccaaaatacctcttgtgatcaatttctagttttattccactatggttcaagaagatgcttgatattatttcaattttttttcacattttaagatgtgttttgtgacctaacatatggtctactttttttttttattaaactttaagttgtggggtacatgtgtagaccgtgcagttttgttacataggtatacacgtgccatggtggtttgctgctcccattaacctgtcatctacattaggtacttctcataatgctatccctcccctaacctccaccctctgacaggacctggtgtgtgatgttcccctccctgtgtccatgtgatctatttttgagaatgatccatgtggattagaatgctgtggaaaagactttggattcctaatatccagggagggagacgatgatattactttcaatatcacacgggtgtacacactctctgtgacattgttcctaatatccagtggaagagaggatgatataacacccagggagggagaggatgatattactcttaatattgcagggtgtgtacccatgcctatgatattgttcctaatatcaggagggggagaggatgatattactcagaatatggcagggggtgtacacacactctgtgacatggttcttaatatacaggggagaatgggacaatattactctcaatatcgcagggggcgtacaaccctgtgatttgttcctaatatacaaaaggggacagtatgatattgttcctaaaatcgcagaaggtgtacaacgccctgtgatattgttcctaatatccagggcgggagaggatgatattacccccaatatcacagggggtgtgcactttccctgttacattgttcctatgatccgagtggggggaaatgacattagtcccaatatcgcaggatgtgtacactactcccccatgatattgttcctaatatcaagggggagagaggaggatattactcccaatatcgcaagggaggtacatcctccatgcaatattgttcgtaatattcaggaggagagaggaagatattactctcaatatcgcagaaagtggacacccaccctgtgatgttcttcataatatccagggaagcagacgattatatgactttcaatatcgctgggagtgtacatcccttttgggatattgtttctaatatccaggaagggagaggattatattacttccagtattgcagccagtgtacacatttcttgtgatattgttcctaatatccagaaagggaaaggatgatattactcccaatattgcaggtggtgtacacccccctctgatattgttccttacatcaaggaaaagaaagaagaatattactcccaatatcgaagagagtgtacacccctcctgtgatattgtatttaatatccatggggaaagaggatgttgttactcccaatatcgcagggggtttacacccacactgtgatattgttcctaaaatccagtgaaggagaaaataatattgctcccaatattgcagggtgtatacaggccctcccccgttatattgctcctaatatccagcggtggagaggatattactttcaatttttgcagggagtgtgtaccccctctctgatatttttctaatatcaaggatgggaaaggatgccattactcccaatatcgcaggaggtgtacatgccctgtgatattgttcctaatatccagggaggtagaggatgatattactttcaatattgcaggggctgtacaccctctatgatgttgttattaatatttaggttgggagaaaatgatatttttcctaatatcctgggaaggaaaggatgatattactgtaaatattccagggagtgtacaccttcctaatattctaatattgttcctaatatccaggggtgggagaggattatattactcccaatatcgcagtgggtgtacacccctcctgtgatgttgtttctaatatccaagcgaggagaaaatgatatcactctcaataccgcagggggtgtacaccttccccatcatatcgttcctaatattcagagggaaagaagatgatgttactttcaatatcgcaggggttgtacacaacccctgtgatatttctcctaatatccaggaagaaagaggatgatattgctcccattatagcagacggtatacgcctccctgtaacattgtttctaatatcaagactgggagaggatgatatcacttccagtatcgcaaggggtgtacacctcccccgtgatattgttactaatatccagggggaagaggataatattactttcaatattgcaggggctgtacacccccgtgatattgttgttaatatttaggttgggagaaaatgatattagtccaaatatcgcagagagtgtacacacttccgataatattgttcttaatatccatgggggagacgatgatattacacccaatatcgcagggggtgtagtctccccttgtgatattgtccctaatattcagggaagtaaacgatgatgttagtgtgaatattccagggagtgtacaccccctttgtgatattgtcctaatatccgcaggagagaagataatattactcccaatatcgcagggggtgaacacaccccctgtgatattgtttctaatatccaagcgaggagaaaataatattactcccaatgtctcaggggatatacaccttccctatgatattgtttctaatattcaggtggaaaacgggtgatattactcctaatatccaggaagaaaggggattatgttactccccttatagcagggggtatacacctcccctgtaatattgttcctaatatcaaggctgggatatacgtggggggaaggatgatattactcccaatatcacaggggttataaaaccttctgtgatattgctcctaataaccatggcggaagaagatgatattactcctaatattgcaggaggtgtacactcccccattatgttgttcctagtatgcagaaaaggagaggatgacattattgccaatatcgcagggtgtgtacaccacccatgatattgttcctaatatttagagggacagaggatgatattactcccaatatcgcagggggtgtacacgcatcccctgtgatattgttcttgaaatcgaggggaaagagaattatatttctctaaatattgcagagggtgtacaccgccccctgtgatattgttcctaatagccgggggcggggggagataattaaattactttcaatatctcagagagtgtacatcccccttgtgacattgttcctaatatccagagcaaaagagaatgatattcctcccagtatcgcaggaagtgtacatttaacctgtaatattgtttctaatatccagggggaagagaatagtaatactcccaatatcgtaggggttgtacaccttttctgtgatattgttgcaaatatttagaagagagagagaatattactcgcaatatcacagggaatgtatacttcccctgtgatattgttctaatatctagaaaaagagaggataatattactcctaatattgcagggggtgtacacccccacttgtgatattgttcctaatataaaggaaggtcgaaaaacaaacggggagcccagggggaaggaaggcaggcgaggaagaggcagcgccggggcgccggagggagcagccgggccgcggaagcgcgagcacgagaccggtcgcggtcgcagtcgcatttttgccgttgtcgcggccgccgccgccgaggcttacccggggatgtctgagcccgcgcctcgcggcccccaagctccacgctgcgcccgctgtcccggcctctaagggccgccacgtccctgcggcgcgcgcaggcagaaagcggcttcgtgccggcggagggggcccgggcgggccgggaaaggctgccccaggccccgcgcctaccccatcaccgcggccggcgccgggccgggaggatgagcggtgtggggctctgaagcatggagggggttttgtacaagtggaccaactatctcacaggttggcagcctcgttggtttgttttagataatggaatcttatcctattatgattcacaagatgatgtttgcaaagggagcaaaggaagcataaagatggcagtttgtgaaattaaaggtgacagctttggaggggaccacccttgattggatacataaattctgttcattcagcagacaacacaagaatggaattaatcattcctggagagcagcatttctacatgaaggcagtgaacgcagctgaaagacagaggtggctggtcgctctggggagctccaaagcatgtttgactgatacaaggactaaaaacgaaaaagaaagaagtgaaaccagtgaatcgctgaaaaccaaaatgtctgaacttcgcctctactgtgacctcttaatgcagcaagttcatacgatacaggaatttgttcaccacgatgagaatcattcatctcctagtgcagagaacatcaatgaagcctcttctctgcttagtgccacgtgtaacacgttcatcacaacgcttgaggaatgtgtgaagatagccaatgccaggtttaaacctgagatgtttcaacggcaccatccggatcccttagtttctcctgtgtcaccttctcctgttcaaatgaggaagcgttctgtcagccaccctggttcttgcaccagggaggagtagccactgtataaaagaaccagtatctgcacttcaccgactctcccagcgacgccgaagaacctactcagatacagattcttgtagtgatattcctcttgaagacccagatagacctgttcactgttcaaaaaatacacttaatggagatttggcatcagcaaccattcctgaagaaagcagacttatggccaaaaaacaatctgaatcagaagatactcttccatccttctcttcctgaagaaactgtagtgtccaactttctctaagtattgctatgcaaaagctgctgtaattgaactattgttatagggagtagttttttcccttaggactctgcactttatagaatattgtaaaacagacaaacaagaaaacaaaccacatacttttgaagcgtgttttatctttatatagtttgtttgcaagagtattttcctaataacttcacagtatgaatgtgcatcttttttttctttttttaacaaatgatggtgtaacattttgacatccataaggacaaatgtagatatttttctaaaaaaccgtgaggggactgacagcttggtcagggtgtattgtagcttataaacatgaaatcttacaaggtttcagtttgacagaagtgtgatatatgtaacttgtgccatggaccaaatggtcactttaccacagctaaaaatgagttatgatagcagcttgatggtgattgcattgtattcctttaatcaaaaaggaaacgcaatattctaagtatctttagcccaaataccatgacatattgagcatctttaaataaccagactgtattgtccttcatatgtgaagttgacactactgatttgtcaataccaaattttgggttaaagtgtttaatttttatttatttattttcttgttgcctcaaaagatgattgcattctaacttttgtgacctaccaaatttaagatgtgtatacattgttctttacgttgttctagaaaagagattttaatgctgtagtgacttagctcacttacatcagagaaataaacaactttcaatggaaaaaaatatatataaaggaaggaagaggatgatattacttctcatatagaaggggttgtacaccccccttgtgatattgttcctaatattcagggagggagaggattatattactcccaatatagcagggagtgtacacccccccccccgtgataatgttcctaatattcagggaagcagaggatgatattactttcaatatcacagggggtgtgctgtccccctgttatattgttcttaatattcaggggggagaggatattattatgcccgatatcacaggagaagtacaccccacaagtgatattgttcctaatatccaggggtaaagaggatgatatcgcaggtggtgtacacccctccccgtgatattgtttctaatataaagaaggagagagcatgatattactcccaatatcgctggaggtctacaccccccttgtgatactgttcctaatatccaggaagggaaacaatgatattgctgtgaatattccagggggtgtacacccctttgtaatattgttcctcatatccagggggtagagaggatgatattactcccaatatcgcagggggtgcacggccccactgtgatattgtttttcatatccaggaggggagaggatgacattactctcaatatggcagggggcgaacaccccctgtgatattgtgctagttaggttgggagaaaatgatattactcccaatatcgcagggggtgtacaccgctcctgtgatattgttcctaatatccatgacgggagaggatattactcccaatatcgcagggggtgtacctctcccctgtgggattgttcacagtatccaaaagggaagaggatgatgttactcccaatatcacagggagtgtacaccaccattgtgatattgttcctaatagccagggaagaaaacgatgatattattgtgaatattacagggggtgtacacaccccctgtgatatggtttttaatatacaggttggaaaaggatgatattactcccaatatcacaaaaggtgtacacacccccccatgatattgttcttaatacttcggtggggagaaaatgatattagtctccatatcacaggggtgtgaactcctccggtgatattgtttttaatatcaagaggggaggagatgatattgctttcaatatcgctgggggtgtacatccctcctgtgatattgttccttatatccaggcgaggggaaaataatattactcccaatagtacacaccccatgtggtattgttcctaatactcagggggaaagaagataatattactttcaatatcacagggtttgtacacctttcctgtggtatagttttcaatatccagggggaaggtacatgatattactcccattgcagcaaggggtgtacacacctcctgtgatattgttcctaatatccagaagtggtgaggatgatattactcccagggggtgtacaccccacctatgatattgtttctaatatccaggggaaaagagtgtgatattatgcccaatatcgcagagggtgtacacttatcctgggatattgtttctagtatttggggagggaggagaggatgctattattctcaatatcgcagaaattgtacacccccgctgtgatattcttcataataatcagggaaaaagaggatgatattactaccaatattgcagggggttacacttcccctttggtagtgttcctaatatccaggaagaaagaggatgatattaatcccattttccaggaagtgtacacccaccgtgtcatgttgttcctaatatccagcagggaagaggatgatattactcccaatatcggagagggtgtacacttcccctgttatattgtttctaatacccagggggaagaaggatgacattactgccaatatcacagggtgtgtaccccaccctgctattgttcctaatattcaaaaggaaagatgaaaatattactcccaatatctcagggtgtgtacacctctcctgtgatatcgttcctaatatccacaggaagagagaatattactctcaatattgcaggggggtgtacacccccctgtgatattgttccaaatattcgggcggggagaggatgatattagtcccaatatcgcagggggtgtgcaccaacctgtgatattgttcctaatatccatgcgggggaggacgatatcactctcaatgtcgcaggaagtgtacacctctcttgttatatttttcttaatatccaggagggaaaagatgatattactgccaatatcgcagggtgtgtccaccccccttttatattgttcctaatatccaatggaaaagaggatgacattgctctccatatcccagaaggtgtacaacgcccctgtaatattgttcctaatattttgggggaagagaggatgatataacttataatatcacaggaggtgtacaccacccctatgtattgttcctaatatcctttaagggagaggatgatattactcccaatatctcaggtggtgcctattccccctgtgatattgtttttaatatccaggggaagagagtatgatattacgcccaatatcgcagggggcatacaccctctctgagatattgttcataatatatagagggagagaggatgatattacttccaatatcagaggtggggtacaccccccggttatattattcttgatatccaggaggggagaggttgatattactggatatatagcagggagtgttcacatcttctgtgatactgttcctaatatccagaaaagtagaggatgatattactcccaatatcgcagaacgtgtacacctccctgtgatattgatcctaacattcaaaggggagaggatgatattactcaaaacatcacagggcatgtacactcccctgtgatattgttcctagtatccagaagggagcaagataatattactttcaatatcgcagggggtgtacacccctctttggtatgtttcctaatatccagaaggaaagagggtgctattactttccatattgcaaggggtgtacacccccctgtggtatggttcataatatccagggagggaaagggtgctattattccccatatcgcgaggcatgtacaccctgctgcggtacggttcctaatatccagggggaaagaggatgctattacttcccatatcgcggggtgtgtacacccccgtgtggtatgttttgtaatctccgggaacgaagagggtgttattacccctcatatcgctggaaatgtacactcccctgtggtacggttcacaatatccaggggattgagggtgctattactccccatatcgcggggggagtgcacctccctgtggtatggttcgaaatatccagggtaagagagggtgctattattccccattttgcaggaggcgtacacccctctatggtatgttttgtaatatcccaggtaaggggtgctattgagagaagagagcaaaagaccccccccatattgttctgtattattttatactcagtacctgttttaagaagaaacaaggaagcgaaaccaaaggcaggcagcccggcgccaggcaccagatccaaaaccagacccgaaaccaggcctgggccttcctgaccttagcctgaaagttaaaattcaacccatgacctagcaactgatgttatccatagattccagacattgtatggaaggacattgtgaaatttcttgttctgttctgtttcactctgagtactggtgcatgcagcccttgtcacatacccactagattgctcaatcaatcatggccctttcatgtaaaaaccttagtgttgtgagcccttaaaaaggacagaaattgtgcactcaacaagcttggattttgatactctagtctgctgatgcttccagctgattaaaagccacttccttcactacctcggtgtctgtgggattttgtccgcggctcctcctgctacactgtgactccccttatagagaggggtgtacacccccctttggttcctaatatccagcgggggagtaggtgctattactccccatattgcggggagtgtacacccccttgtagtacggatcgtaaaatcaaggagggagagaaggtgtaattatccccatatcacagggagtgtacacccctttgtggtatagtttgtaatatccacgacgggagagaatgctattactccccatatcgtggagggtgtacaccgccctgtagtatggttcgtaatatccggaaggggagaggttgctattactccccatatggtgggaagtgtacacccccatgtgatatggttcataatatccaggggggtagaggatgatattacccacaatatcatagaaggtgcacacccttttgtgatattgtccataaaatccagaaggggagaggatgatattacttccaatatcacagggggtgtgtagccccatatgatattgtttgtaatatcaaggtagggagaggatgctattccttacaatagctcaaggggtgtaaccttcttgtgatattgtttgtaatatccagaaggggagaagataatttttttattttaaaagtaaactttaatgtcaaaaatgcaaacttgagaagggcagaaagatcaaacagaaggctgccacttcacaattggagggttgcacagtggccgggcagaggcgctcctcactccccagacggtgaggcagccgggcagaggtgctcctcacttccgagatgttgcaggagccgggcagaggtgctcctcacttcccagaacagggggctgccgggcagaggtgctcctcactgcccagacggtttgcaggcctggcagaggcactcctcacttcccaaacggagcagcggcaagccagaggcgctccacacttcccagatggtggggcagccgggcagaggcgatcctcacttctcagagggtagggcggcccagcagaggcgctcctcacttcccacatggtggggcggcaggctagaggcgatcctcacttcccagacggtggtgtggccatgcagaggtgctcctcacttcccagatggtgtggccgccgagctgaggcactcctcacttccctgacagtggggcggctgggcagaggcgctcctcacttcccagacacttggactccgggcagagactctcctcatttcccagatggtggggctgccgggcagaggcgctcctcacttcccagacggttcagaggccgggcagaggcgctctggggagaggataatgttactcccaatatcgcagggggtgcacactccctgtgatattgttccgaatatccagagggggaaaggatgatatagctcccaaaatcgtggggagtgtacacccccctgtgatcttgtttgtaataccaagaagaaaagagaatgctattatttccaatatagcagggggagtacaaccccctgtgatattgttcgtaatatctagggggagagaaaattatattagtcttaatatctcaggggacgttcatccccctgtaatattgttggtaatattcagaatggagaagatgatattgttcttaaaatacaggaaaaaatatgataatattacttccaatatcgaagggggtgtacactctcctgtgatattgttcccaatatccagaatgaaagaggatgctattactcccaatatcccagggagtgtacacccctttgccatattgttcataatatccaggggaagacaggataacattactcccaatatcaccgggggtgtccacccactagtgatatttattgttcatcatatccagaaaaggagaggatgatattactcccaatattgcaggtggtgtacggtccctgtgatattctttgaaatatctagaaaaggagaggatgatatcactccgagtatcacagggggtgtacacccccctgtgatattgttcgtaatatccaggggagaaaaggatgatataattgccaatatttcaggggatgtgcacctccctgtgatattgtttgtaatatccaggggtggagaggatgatattactcaaaataacgtaaacatcctgtgtgtacatcccctgtgatattgtttataatatccaggggggtagaagatgacattacccccaatatcacagagtgtacacacccctgggatactgttcataatatccaggcgggaaagaatgaactacttccaatatcgcaggatatgtacacccccctgtgatatatttcctaatatttatgtgggtaaggatattacccccaatatcacagaaggtgtacatcctctttgtgatattattcctaacatccaggaaaggagagaatgatattactcccagtatcgcagggggtgtacaccacccctgtgatattgttgctaatatccagggggagaggataatattactcccaaaatcacaggggacgtacactcctcctgagatattgttcctaatattcatggggaaaagaatgctactactccaaatacagcagagggtgtacaccatccccgtgatattgttttttatatccaaagggtgaaaggctgatattactcccaatatcgcagggggtgtacaggccccccatgatatcattcttaatatccagggaggcaaagaatgatgttactcccaatattgcaggctgtatacaccccccgtgatattgttcctaatatccagagtaagagaggatgacattgctcccaatattgcaggggttgcacgcacgccctgtgataatattactcccaatatcaacagtgggtgtacactcctcctgtgatattgtttgttatatctaagaaagaagaggatgatattactgtcaatatcacagaaggtgtacagccccttgtgatgttgtttctaatatccagcggtgagaggatggtattactcgcaatattgtagggggtgtccaacggccctgtgatattgtttctcatattcaaaaaggaaaagaataatataactccaaatatcgcagggtgtgtacacttccctgtgatattgatcctaatatccaggaagagagaggatgatattaatcccaatatcacagggggtgtacatcgcttctgtgatattcttcctaatatccagggggggaggggatgctattactcttaaaatcgcagggaacttacactcccactatgatatttttcctaatatccaggaagggagaaaatgatattactcctaatatcacatatcacaatgggtgtacatctccccgtgatattgtttctaatatcaaggatgggagaaaattatattactctcaatatcgcagggggtgtgcacacctcctgtgatattgttcctagtatccagcggaggagatgatattactttaaatattgtagaaggtgtacaacccccctttgatattgttcctaatatccagggggaaaggagatgatattactcctaatatcgcaggggctgtacaaccctatgtgatattgtttcttctaatatccaggggtggagaagataatattactcctaaaatcgaaggggacatacactccccctgtgatatttttcctaatatccagaaggaaagaggatgatattactcctaatattacaagaaatgtatacctgtcctgtgatattgttcctaatatccagaggggtaaatgattatattactcccaatatcgcaggggtgtacaccttccctgagatattgtttctaatatgcagtggaggagaggatggtattactcccaacatcacaggagatgtaaactccccttgtgatattcttcctaatgttcaggacgaaggagggtaatattactcactgtattgcagcagggggtgtagagccccctgtgatattgtttttaatattcaaggttggagaaaataatattccttccaatatcgcatggggtgtacacccttctttttatatagtttctaatatctggggggagaggatgatattactcccaatatcgcagggggattacacccccactgtgatattgtttttaatatccagggtgggagaggataatattactccaaatatcccagggctatacaccctccgtgtgatattgtttctaatatccagaggaagagaagatgatattactcccaatgtcacagggtgtgtacaggccttctttgatattgttcttaatatccatgagggagaggatgatattactcccaatatcgcaaagactgtacaccctttctgtgatattgcttccaatatccagggagggagaggatattacactcaggatcacagggggtgtacaccccaacctgtgatattgtttctaatatctagggaaaatgagggtgatattactatcaatatcacaggaggtgtacactcccttatgatattgttcctaatatccaggagaatgacaggataatattactcccaatatcgcgggtggtgtctccccccactccgtgatattgttcctaatacccagagggggagagaatcatattactcccaatatcgcaggggatgtacacctacatccggcggagtagaagataatattactcacaatatcgcaagaagtgttcaccttccctgttatattgttgctaatatccagggagtgagaagatgatattactttcaatactgagcgtgtacactacccctgtgatattgtttctcatatccagtagaggagaaaatcatgttactcccaatattgcaggggtgaacacctcctttgtgatatttttcctaatatcaggaaagggagagtatgatattacccttaatattgacaggggtgtacacccccctttgatattgttccaatatccaggggggcagaggataatattattcccaatatcgcagagggtgtacaccccccgtgatattgttcctaatatccagagaaataaaaaatagtattatttccaatatcacagggcgtacattttccctgtaattttgttcctaatatctggggggtggggtggcaggataatattactctcaatattggagagggtgtacacccccctgtgatattgttcctaatattcagggtgggagagaatgatgttactcccaatatctcaggagtcgtatacacccccttgtgatattttttctaatatccaggaggcagaggatgatattgctcccaatatcgcagggggtatacacccgagctgtgatattgtttctaatatgcaatatgggggaaggatgattttactttcaatatcgcagggaatgtacactttccttgtgattttgttcctaatatccaggggtggagaagatgctattactatattactcctcatatcgcaggcggtgtacaactccctgtgatatggttcagaatatccagagtgaaaaaggagggtgacattactcccaatatcgggggggtgtacacccctttgtgatgtggttggtaatatccaggggggcagatgagggtgatatcactccccatatcgtggaaggcgtccacttttttgtgatgtggttctttatatcccgaggggagaaggtgatattactccccatatcgcgaagggcatacacccccctgtgatatagctcataatattccggagagtggaggaagatactatgccctatatcgcgggtggcctacaaccccctatggtttggcttataatatccaggggggagagggtaatattgctccccatattgtggagacgtacagccccctgtgatatggtttgtaatatctttggggggcgagggtgatattactccccatatcgcggggagcatacacccccgtgatctggttcatagtatctcaaaggaagaagttgatgtgtacaacttaagggaaaaagttgaagtgaagtgtacacacgccctgtgacgtggttcataatatccaggcgggggagaggagagtgatatttactccccatatcgcgggtgttgtaaactcccctgtgatatagttcataatatccaggggagagaggagggtgatattgctcctcatatcgcgaagggtgtacaaccccctgtgatatggttcataatatccagaagggtagaggacgatgatattactccacatatcttgggaggtgtgatatggttcgtaatatccagcgatgagagaatgatattactccccatatcgcaaaaggtgtgatagggtttgtaatatcctgagggggagagggtgatattaatccctatattgcagaaggactacaccctcccatgacatggtttgtaatatcccagggggtagagtgtgatattactttccatatcacagggggtgtgatatgattcgtaatattcgaagggggagagggtgacactactctccatatcacggggtgtgtgatatggttcttaatatcccaggggttagaggttgatattaccccctttttggggggtgtgtacaccccctgtgatatggttcgtaatatcccgggggagacagggtgacattattccccatatcgaggggatcgtacaccccctgtggtgtggttcataatatccctagggggagatggtgatattactccccatatcagggggcgtgcactcttctgtggtataattagtaatatccagggggcagaggtcgatattcgtttccatatcatgaagggagtacacttccctgtgatatggttcctaatatccaggggggagagggtgatattattccccatattgcggggggacatacaacccctgtgatatggttcataataaccagaaaagaagagggtgatattaatccccgtattgcagagggcatacaccccccctgtgatatggtttgtaatatctaggggaggaaaaggtgatattactttccatattgctgggtgcagacacccctttatgatatggttcataatatccaagttggagagggtgatattacttcccatatcatgggaggtatacccttccctgtgatatggttcgtaatatccagaaggggagagattgatattactccccatattgtggggggcgtacaccttcctgtgatacggtttgtaatatctaggggatatagtgggtgatattactcaccatatcacgggggttgtaacatggtttgtaatatccaggggaggagagggtaatgttactccccatatctcggggcatgtacaccctcctgtgacatggttcgtaatatccaggtcgggagagggtgatattactcctcatattgccgggggtgtgttatggttcataatatcctggggaaggaggctgctatcactctccacatcttgggggatgtacactctcctgtgatatggttcataatatccagggtgggtgagggtaatattactccccatatcgcgggaagtgtacatacccctgtaatattgtttgtaatagaagagagggtgatattactccccacatcgcgggtggtgcccacccccctgtgatatggtttggaatatccagggggatgaggagggtgatattactccccatatctcggtgggagtacatccctctttgatcaagttcataatatccaaaaggaaacaggagagtgatattactccccatatcgccgggggtgtacacgggagggggagtacacccccggcgatatggtctgtaatatccagggaaggagaggagggtgatattactcaccatatcgcaggtggtctacatttacctgtgaaacagtttgtaatatccagggggggaaatgagaatgattttttttttttgagtctcactgtgtcacccaggttggagtgcagtggcacgatcttggctcactgcaacccccgcctcctggactcaagcaattctcctctcccagcctcctgaatagctgggactacaggcgcaccccacaacgtctggctaatttttgtatttttattagagacggggtttcaccatattggccaggctgatctcgaactcctgaccctgtgatccatccgcctcggcctccaaaagtgctgagattacagatgtgagccaccacgcatggcccaaggagaacgatattactccccatatcccagggggtgtatatccccctgtgatatggttcagaatatccggaaggaaagacagggatattacttcccatatcgcaaggggtgtgacatggttcgtaatatcccatgggggagagggtaatattactcttcgtattgtgaagggcatacactcccctgtgatacagttcataatattccggggagtagaggaagatattatgctccatatcgcgggtggcataagccccctgtggtttggttcataatatccagggaggagagggtaatattactccccatattgtggggacgtacaccctcctgtgatatggtttgtaatatcccagaggggagagagtgatattactccccatattgcagggacatacacccccctgtgatatggttcaaaatgtcttttttttttgaaggactggttctttatttcaaaaagacacttgtcaatattcattatcaaaacagttgcactattgatttctctttctcccaatcggccccaagtagaccacatcaaaggagagtacatattaagccaataagctgtaggatgtacacctaacagacctcctagaaaccttaccagaaaatggggacagggtagggaaagaaactttaaaagatcaacaaactgccagcccacggactgcaggggctgtcacagccagatggggtggccagggtgccacaaacccaaagaagcaaagtttcaaaataatataaaatttaaaaagttttgtacataagctattcaagatttctccagcactgactgatacaaagcacaatgagatggcacttgtagagacagcagcttcaaactcagaaaagggtaatgagatgagtttcacatggctaaatcagtggcaaaaacacaatcttctttctttctttctttctttcaaggaggcaagaaaagcaattaagtgctcacctcaacataaggggaacatgatccattctgtaagcagttgggagggggtagagatggaacaaaattttggtctcagaggtcttgccatcttaatttggtcacttctaatgaaaaaaataaaaaatagaaataacattatccaaaggtatcttaaagctgaaaacttgaacagcacattttttgttgttgttgtttggctaactcctcctggaaccacctttctggcttagctagtactttgtacagagcaatgaggcttcccatagtggagtctccctgggctctgtttggctctcagcaaggcaggcctataccttttcctctcctccatggagagaggaatatgcattaaggtgaaaaatcaccttccaaaagtgagaaagggattcgatcgctgcttcagggctgtggtattatatggaatgttttacaaaaggttgctacaaaacaacaaaagaggtaattacaaaatgtgtacatcacaacatactttttaaagacattatgcattgtgctcacattcccttaaatgttgtttccaaaggtgctcagcctctagcccagctggaatctccgggaagaggcggacagtttggtgaaaaagacacagggaaggagcgggcggcggaaggagggggcggcgaaaggagaaagcagccttccagttaaagatcagccctcaattaaaggtcagcttcgggcaggctggcctcaggcggagtctggttcagagggaggagcagcagcagggtgagactgaggcgttctacatctcattcaggtcaagcagagtctggtccagcatcctttgtgtacagaggtgctcccctttggtgcatttcagtttatcttccaagtcatcaattgtcttttccagcttggctaccgatctctcagcaaactcagcatgggtctccgcctcctttattttatcagtaagaatcttgatctcttcctcatatttgtcttctttttgagagtacttttcttcagcagcactcagacacttcaggttctggtccatcagtctaatctgctcatccatctctcggcaaagggattctgccagctcagctcgttcctctgtgcgttccaagtctccttcaatgatcaccaacttacgagccacctcttcatacttcctatctgcctcttctgcaatgtgcttagcttctctgagttggatttcctggagttccatcttttcttcatcttttaaggcccggttttcaataaccttcttacctctctcactctcatcagcagctttttccgcttcttccagcttttgcagggcagtagccaggtgctcctgagcacggtccagctcctcttcaaccagctggatcccacgttcaaggaggccacctcagcctcagcctgttcccgggcccacctttctccctcaacttctcgctggaggcgctcagctcgctcctctgcatcatctgcctgctgctgcagaacctggatcttgcgcttcaccgcctcgatggtggtgatcccagccatggtgcccacccagctactgctagagctccggttcctgcctcctccgatcggcgttgcagcctcctctcacccttacttccgcctcggttcaaaatatcttaagggaaggagttgatattactccccacatcacgggaagtttacatcccctggtgatatggtttgtaatatcccagggtggatagggtgatattactctccatatcgcgaaggagtactcccccctgtgatatggttcataatatccttggggggagagtgtgatattactccccatatcgcgagggccatatactcctttgtgacatggttcgaaatatcccggtgggggagggggtagagggtaatattactccccatacagcgaagagcatacgcccttctgtggcaaggttagtaatacttcagggaaaagagtgcaatattacttttcatattgcagggaacatacactcccctgtgacatggttcgtaatatcccgggggctgagagggtgatatttctccccatatcaccgggggcctacacctgggtgtgatatggctcataatatacagggagggagagggtgatattactccacataccgagtgaggggttacacaccctcgtgacatgttcgaaataccccaaggaggagacaatgatattactttccctgtcgcgggggctacaccctcccagtgatatggttcacaatatcccggggtggagagggtgatattactccctatatcaccggggggtgtacacttccctgggaaatggtttacagtatccccggggggagagggtactattactccccatatcacgttacatatcagggtacacccccacgtgatatggtttgtaacatcccaggaggaagaaaatgatattactccccatatcgcggtggcatacacccctccccgttaaatggttcataatatcttggggtggagagggtgatattactccccatatcacgtggggcatacaccccactatgatatggttcataatatcccggaggggagagggagatattactctccatgtcgcggggggcatatacacccctgtgatatggtttgtgatatcccgggggcggagagggagatattactctccatatcgtggggtcgtacacttttctgtgatatgattcgtaatatccagacggggagagggtgatattacttcccatattgcgggggcgtacacccctctgtgatatggttcataatatcccgaagaaaagagggtgatattactcctcatatcgcggggaacacacaccaccctgtgatatggtttgtaatattcagcgggggagagagtaatattactccctgtatctcggatggcgtacactcccctgtgatatggttcataatatccagaagaaaagagggtgatattactccccatattccagggaatgtacaccaccctttgaatatggttcgtaatatccaggaggggagagggtaatattgctcccaatatcgaaggaggtgttatacggttagtaatatccagagaaggagagggtgacattactccccacatcgtggtgggtgtgcacccacctgtgatatggttcataatattcaggttaagagaggtgatattgctttccatatcgccaagggtgtacactcccgtgaaatacagttcgtaatatccaaaaggggagagggtgatattactcccatatcgtggggggtgtacacccctctgtgatatggttcataatatccagggtggaataaggtggtattactccctgtatctcggggcatgtacatcgcctgtgatatgattcataatatccagaagaagagagggtgatattaatctccatattgctgggggtgtacaaccccctgttgtatggtttgttacactgagttggggagagggttacattactctcaatatcgagtggggcatacacacttatgtgatatggttcataatatcccagggaggagagggtgatattactccccatatcgcgggaggcatacaccccaatgtgatatggtttgtaatatctacatttttttttttgagacgaagtctcgctcttgtcccccaggctggagtatgatggccggatctcggctcactgcaacctcagcctcccgggttcaagcgattctcctgccttggtcccccaagaagttgggattacaggcgcacaccaccacgcccggctactttttgtatttttagtagagaaggggtttcaccatgttggccaggctggtctagaactcctgacctcagatgatccacctgcctcggcctcccaaagtgctgggattacaggcgtgagccactgcacctggcctggtttgtaatatctatgaagggggaaggtgatattactttccatatcacgggaggcgtacaccacgatgtgatatggtttgtaatatccagggggtatactgggtgatattactccccatatcgcggggagtgtatacccttttgtgatatggttcctaatattaagctgaggagaaggtaatattactccccatatcgcaggggtttttatatggttcataatattcaggaagagagagggtgacattactctccatatcacggggtgtgtactcccccatgtgatatggtttgtaatatccagggaaggagaggttaatattactccccatatcgcagggggtgtacacctctctgtggtttgtaatatccaaagggaagaggatgatattatcttcaatatcttggggggatacagtccccagtgatattgttcataatatccagagggggaggggatgatattactcccaatattgcaggtggtgtacaaccccctgtgatattctttataatatagagggggatgatgatattactcccaatatagtaaacaacctgtgtgtacaccccctgtgatattgtttataatatccaagggtggaaaggatgatattactcctcatatcgcagggggtgtatacccctctgtgacattgttcctaatattcaggggaggagaagatgatactactcctcatatcacaggggatgtacacccccctgtgatacttttggtaatatccaggggaggagaaaattatattattccccatgtcacagagggtgtacaccccgctgtgatagtgttcataatatccaggtgaaaagaggatgatattactccgaatatctcaggaagtgtacacccttctgtgatattgttcataatatccaaaggtggagaggaggatactactccccatatcgcagtgggtgtacacccccctgtgatatggttcataatatccaatgtaggagaggatgatattactttccatatcgcggagagtgtacatccccctgttatattgtttgtaatattcagggagaaagaggatactactactccccatatcacacggggtgtatattcccctgtgatatggttcctgatatccaagagatattataatcctctcttggattatgctacctctcatatcgcatggggtgtacacacactttgtgatatcgtttgtcatatccaaggagggagaggattatattaatcccaagatcacggggggtgtacaccctcctgtgatattgtttgtaatattaaggggggagaggataatattactcccaatataattaacaccctgtgtgtactcctccttgtaatattgttcataatatccaatgggggagacgatgatattactttcaatatcgcagaggatgtacatccctttgtaacaatgtttgtaatataaaaggcaagagaggatgatactacttccaaaattgcaggacatgtacaccccccggtgatattgttcctaatatccagtggggaagaggatgatagtagtcccaatatcgcaaagggtgtacacaccccctgggatattgttcctaatataaaaggaggagaggatgctattattcccaatatcacagaaggtgtaaaatcccctgtgatattgttcgtaatattcaggaggggagaggattatattactcccaatatcacagggtgtgtacacagggaggggcaagggccagaagcgggcgggaatccccatgtttgggcggacccagtttctaatggccagcatttgccaatcaaagcttaccagagaactctaaaagccagggctttcctgctagacaagactcatttctggaactgctttaaaaagaaacaaaacttcccaaggaccccttttcctctctgtctgcctaaaataatgttttaaaaactcctaaagcagctgaattcagcccccttcctgggggaatgtatagacggaactcccacctttcccggcatcccaaggccagagtatgtgaaactcctgggtctctatgtgtgtctgagcggctgctctgccaacactccacacagccctgtgtcctggacccaaggcccttatgacctgagctcaagaggggatctcctgatccatgggttgcaaagatccatgggagaagcatggtttctggggcggggtcacacgctcagtcactgtttccctcggatgccggagatggttcctttggctctctgccaatacagggtgaatcatcatccatccctcttttctttgttctcccgggtcaagttgtttgcctagtcagtcccaatgtgagaacctgaatatttcagttgacgcgctgacttcaaaatccccgggcttcgggaggcggagcttgcagtgagccgagatcccgccactgcactccagcctgggcgacagagcgagactccgtctcaaaaaaaaaaaaaaaaaaaaaaaaaaaaaagtccccgggcttttcttttcactcagtggaaggcagctgcttctaattggccatcttggcccgcccccaccacgtgaccttctgtaaaatgcctccactctccaggaacgctctcattatataactttgcctgaaaccaacagcacgctcattgcacatatcatgggctcatttatttcacttataaagaacctggccaaggaagagatagtgcctaaagtggccagtattctgaccgatatgttagaaaaatggtgtgccgaccaattcatgacatgtgtcccaaaactagcaacggaaattgtattcgccgtgttgaggtctctaatccagatgatgctcatctatgtactggaaaaggcagagtcctttcctgacaagctgctgaaactcttcagaaacatctcatatttcctgaagaagatgatgtctggacaagcagcacaggtcgttcagatttaactttctattcatatatccagcacgatattcgcacaattgtcacgaaaccttaccagttgatgagtcctgcacatttcctttaatttcaggaggaagagggtaatccggatgagttttctgacctactctgctgctgtgattaaacaaccaccaggaaattttgacgacactgttctcctgagctcctccctttcctccgggaacaaaacaattgaatttacaaaaataaagtgttatttgactggagtgaggtctcatgtctgcttatgcggtggctcgctgctcagaacagggtgagtctctgggttgtgtgctgaggaggggaggctctcaatctggagaaaacccactgcaggggacacctccatggggtctgagggactgaggatgaggagccggactgggtctagggaaggaggaggtttcagagggtgaaattctggcactaaagcctgggggtgtttgggaacttcctccttccgaagaagtttcagggagggataaagacaaaccctgggctccttgaggggcccttactaatttgagaggactctatcgggaaggagagtgacaatggcctccttgaggactgaggcccctgaataaatgaggcccagatacagtccatgggggatgagaccttcaagggtcacattttggttgggacagaggaaaagtgcagctctgcagccgcagaggaaaacccggcagtgtgaaagcgaccttggaggggccctgtgcgctctgaatgcgtctgagcccccatcccctgtccccgcctctctttctggattcttccagctcggctgtctccgccatcttctgagcgctccaccctgacttattcaagtttcccttctgccttccaagtactccaaaatctttcagatctgtgtccctacccctgtttttagcatgtgttggggctccaggtccctgaaggtttctggcctgaaatccacctccccagcggagtggactgcgttctagagactccacactccgcgaggttcccaggcccctgagggacaaccgagtggcctgcgcacttcagggctccacactcggcaaggtctttcaagcccttggggtccccttcttagttttttccacctttctgggctgcagtcactccataaatgctgggatctgatccccacccccactctcgtttcctcaattctgcgggctacacgctctggcaaggtcctccgggccctggatcccctccctctccctatgcccacgctcctagtcagcccttctggggtccactattttcaggaactaaccgttctcatggagccttgctaaccggaaagctgtgtggaagaaaggctttgaggatagaggtggagatttggctcttccatagtgccactcacccaccccaccatgctgccactgccagacccggacccctgtttcagaacaagtgaccagattcgctcctggacagccctggacactggccttttctctgaaaactactcaccctttctctagtccccacttcatgccagcctcataccctcttccttcccccacgctggcttccgggatcctcctctgctcagacaacctcttctgtgtcccacccccgtttttagaatgctttggggcaccaggttgggggaaggtttctggcctgatatccatctctttccaaactcccttcttcccttgaaaggcttcttgccttcagccccacttctggctccgaggtttcaggacaccctcctcttcatcctcattcttttgaccaccagctttttaggaattcgaacgtccctctcatcttcgtgaatcctgtccaggcatttgttgaccccttcatctgatacccctgacctcacattgccaaaagtctacccctacccagtacactggaattagacaaaatcccaggagttttacctcaactctgagtgtgcccacaggagctctccctgaagccacgtccttttaagcagggtctagggttcctcccttgtcttaatgaactctttgtcacacggaggacgttatggagcccttatgatctttcactgcctttctgcccagcgttttgtctttccatggacatttataatattttccatggacattttgttctctcaatgtccacccctaatttccaacatcccaaagattctcatgtgtttcctgaaagccatttacaggaatggctgtgcccagacccccttccccaggatcctccttcacacctggtaggtgcctctcctagagagatttgcactcagttgtcgtgcagtcacatggcccagatggttgttaatcacccccttcctggcaacagctagcagccagggaatcactggcacagaaacctcagggtgaccaagatgaggccacctctgtgctgaaggctgtgctccagagcctgcttgggatcaggcttaagcaggtcttcagccagacctgatgttacctggtttccttgagctgccctgcctgagctatcgggagcactccctcaatgcacatcttgattccctatctcatgctctgcttctagaaaccatgagctatcaattgctactggcaatggtcctgggaagtcaaccctaagtatggattctggggttggatgactccccacaggacttcagtgagcaacaatcactgctggcagttggaggacagagtcgctagggcatgtgaccactgtgaaaccaccgatgtttcacctggggtaattttggatgaactacggtagaagcactgaaggtacattgcttttggtttggaagattgtaggtaaataatagcgatatgaatgtggaattggatggctgcaaacgagtgccattgatgcattgaaagaggaaaagtcaggctgtcacctgtcactcagcaatttaaagtgtgagagttgggactagatgtggtggctcacatctataatccagagattcgggggaagcttgaagaggtaggatcttttgagtccaggagttccagaccagcctggacaccagagcaagacctcatctctacaacaaaattttcttaaaaattagatgggcttggtggcacgcacctgtacttgtagatctagctaatggggagcatgagataaaaaaatcacctgagtcagggacttaggggttacaatgaggtatgattgtgccagtgcacacactcccacctggccaacagagtgagattctgcttccaaaaaaataagaaataaatcaggtttgagagttggaaagcatcatcttctcctagagccaaaggacatgtacaactgagacccaggaacaaagcttcatcacaaagagaccatcatcagtggagccgggagatgcattccccctcaccctgccttgaggaggcagtggagtcatctgtctgggatcctttctgacccagccctatttgtttgtctctttggcttctttggatttgtatattttagctgttataacactgtaaaacaaacagagtgatttttttgagttgtgtgaatgatgctagctccatagtcaccctgagagtgatgggaacttttgaatttgtggcaagttggagggtagtgtaagtgacctgagattgccaaattggggctagcactggatgtgaggttaggctagtggaaaaatatgcccagaaccagaggagtgtgggctcactgcaggtggttaggctcagatccaaattgtacagatggatagctttggggtaaagaataacatagttgagaagtgcatgtgttagtctgttcatgcactgctataaagaattacctgagactgggtaattatttataaaactcaggtttaattgggtcatggttccacaggctgtacaaaaagtatgatgctggccatcagctcaacttctggggaggccccagaatagttagagtcatggcaaaaagtacaagggaagcaggctcatcttccacggccagagctggagcaagtggtaggagaggtgatacacactttcaaacaagtaggtcttttgagaactccatcaccggacagcacctatgggatggtgctaaattattcatgaaatatccgcctccataatccactcaactgtcaccagcgcagccagccccacctccaacagtggggattacaattccatatgaggtgtgggtggggacacagctccaacctcaatcagtgggcatcctggattgggtctactatagaaggagaaccaggagctgactatgatcttgaaccctacccatgatggccgggcggggtgactcatgcctgtaaccccagcactttgggaggctgaggtgggtggatcgcctgaagtcaggagttagagaccagcctggccaacatggtgaaaacctgtctctactaaaaatacaaaaaattagaccggcgttgtgctggatgcctgtaatcacaccactacgctccagcatgggaaaaaataccaaaacttcgtctcaaaaaaaaaaaaaaaaaaaaaaaaaaaaagactgcccatgaccactgcaccagtgagagggacaccagcatcactgagatgcaagggctggacattcttcataggtcagagctcaaagcaggggacactgatacagagatgggctccatccatagcaccaaagtggtgagaggatgtgggaatggcagaggccagcactttgccatcaatgcaagggggtataaggaggtgacaccagtgccagagtacatcacggggggactgccctacaatatctaggacttacctcttagagcgtgtttcattagcgacaacagatataaatggcagacaggtgtgtccctgcattaacaggaaatagaaatcatcaagaggaacagaaggcagatgtcagcagccccttagaaagtcatcatccttcatacagttaaaatctgagacagttctcacacgagaaggcctaactcaaaaagaggctgggttctcatgaggcaggtttatgcaaaaccaaggaaggtgtacaagtttggaattctccagtttcccttggaaaagacctacagtcatttgcttaggtaactgagcactgaacaaaggtgagtattgttgtcttttagaagctcttggccaagaaggccttgttggcataaaacccatggtttggaaacatcaccatgacccctgttagagtaatggcctaagggtgggggtcaggaaattgatgtattccttgccaacttctgcctctaagtgagtgaactctgtttgtgaacctctctcctctgtggttatgttcctaggctctcatgtataatcaggagtcatagacttagaaacaggaaaaatacttacagtgtttttgtggcctgtgagctatgacttataattttaggaaaaaaacaattgcaaatggaaagcctaagtctatcaatgctcatccaagacaacataatcaataaaaaccaatatcaaatctcaaggcaaattatttcctgtatatagatggcagagatgagcaccaccatcaaaaactcaaggaccagtgctgtgggtccagtcatctgtttcatggaattcaccagtctggtatcttcaaaatccagaaggatgatggcagatggcaggaaagtaatgcaaacgtcatcaggtgtgaccccactgtagcagctgtgatggatgttttctctcaccatagcaataaataacacaacctcggtcacactgtatgcattgttggtctgcaaaatccatgttttgcaaaactcttcaggaaggtggatctgtaatattggcattgacatgagaacaacagcagtatttattcacaatctcaagctctctgtcttcccgtctctctcattagccatccaagtagtcctgaggaaccaagcccatcagaacattctgcaacataatacacagctccattctccattcaaattttgttgttgttgttgttgttgatgagacaacatcttactccatcagccaggctgacgtacagtggggctatctgggctgactgtagtcttgagcttccaggctcaaggcatcctctcacctcagcctcctaagtggcttgaactacagacacacagcgacatgctgggctagtttttgtatattttgtagagacgtgctctcaccatgttattcaggctggactcaaactcctgagcgtaagtgatccaagcaccttggcctcaaagtgctgagattacaagcctgagccactgcacccagcccaatctccattctactgataacaatgtcattaccaggtctgatggacaggaaatggtaaggtttctgaaaacctaaggatcacacagcgagttccaaaggctgaaagtgcatacctgtcgacactgataccaatgacatccaatggtgagaatgacattccttgtagtcctagctctgctcataacaaatctatactgaagtgtaagagtttgatggtcatggggattttccatgtctctgcctttcagcgatgtgccatatctgtgaagtgttcagaaatgcaacagcctgaggcatgctgggcatatcctctaataaaaaggaaaatgccattttatggtcctgtatttctacaagttggaacacatgggcctgtgatccagatgggggaaatgggaatattcccactcattcaccttcatccacgaagcccatttgaaagctttgggcttcccatccttgtagattttagtgttgtgggctgggtgcagtggctttcacctgtactgccaacactttgggaggcctagacaggtgaatccactgaggccaaaagttcgagaccagcctggccaagatggtgaaaccccgtccctactaaaaatacaaaaattagcaaggtattggggccagcacctgtaatcccagctgctcgggaggctgaggctggagaatcgcttgaacccaaaaggcagagactgcagtgacccgatcctgcctttgcactccacctgggcaagcagaacaaaacttctgtcttgaaaaaaaaaacaaaaaacgaacaaaaaagatgttagagttctgggtttagaggtctataccccagaaagagaatggtttcaacaagggacaaagaagttgctttaaacgttgacttgccatttcttttcagtgtgtttgttctcttgcgtcaagagaccaccagaaaagtggtgcaattactctcctgtcaagaatcattgactatcatctgcaagagggtcagatcctggtatataattagggcagaaatacttagtctgagaagggtatgacatccagaggccctattaatgatgtccttttctccatgcctgactctgaccccatgtgctggactgcccctgtgtggatggcctcatggcctgctcggactctgaggtcccaccccaagtggcacctccatggagggctctactcttgtatgggctctgacactcacactgagacactctcccatggacacctcttcacccacttggggtctgaaactgggctactccatccctccctaacctggaacagagagctttcactgctattacacaagtcatagaggctaactcctcatttttccaagctaattattgaaacattagtcctgggttgataagacaagataagttaacttttcataaatttgcttatcaagttttgaataaattcaaataaattcaccttccccacacaccttagttgtcgacatcacacgcgcacccatactcacagggtgagcacgaaggcttcactgtcagtggagaaagtggcaaaacccttctgtgcctcatcctggtctagacctggccctcatcctttcccactcttcccctcactcccttggattcatccacactggcctcctgcctgctgctccacctccctgcgaagctcacccctgcctcagggcctttgcacgtgcagtggcttcaagccatatcctcttcacccagatctcccagatctcctgaatgatcttcttttatcattcaggtctcagcttgcatgtaatcttctcagtgaggattacccaaaccacatagttcattcattcattcaaatattcattcaatggcatattgacaaagcagctacttcatgccaggccttgggccaggtgttatggatatggcaacaaacaaaacaagagttttctgctctcaaatttttacccacttaaaggagatatcatacatcatctgtaaataaatacatcatctgtaaataatgatgtaaataaatacatcatctgtaaatctgtaaataatgatgtaaataaatacatcatctgtaaataaataaagtataataaaagaaaatagtaggtttttttggttggaggtgaccgtgaagtttgcaaataccatcttacaacacattattttattttatttcatttcatttttaattttattattattatactttaagttttagggtacatgtgcacaacgtgcagatttgttacatatgtatacatgtgtgaagttggtgtgctgcacccattaactcgtcatttagcattaggtatatctcctaatgctatccttcccccctcccccaccccacaacagtccccggtgtgtgatgttccccttcctgtgtccatgtgttctcattgttcagttcccccctatgagtgagaacatgcggtatttggttttttgtccttgtgatagtttgctgagaatgatggtttccagcttcatccatgtccctacaaaggacacgaactcatcattttttatggctgcatagtattccatggtgtatatgtgccacattttcttcatccagtctatcattgttggatatttgggttggttccaagtctttgctattgtgaagagtgccgcaataaacatacgtgtgcgtgtgtctttatagcagcatgatttataatcctttgggtatatacccagtaatgggatggctgggtcaaatggtatttctagctctagatcactgaggaatcgccacactgacttccacagtggttgaactagtttacagtcccaccaacagtgtaaaagtgttcctatttctccacatcctctccagcacctgttgtttcctgactttttaatgatcgccattctaactggtgtgagatggtatctcactgtggctttgatttgcatttctctgatggccagtgatgatgagcatttcttcatgtgttttttggctgcataaatgtcttcttttgagaaatgtctgttcatatccttcacccactttttgatggggttgtttgtttttttcttgtaaatttgtttgagttcattgtagattctggatattagccctttgtcagatgagtaggttgtgaaaattttctcccattctgcaggttacctgttcactctgatggtagtttcttttgctgtgcagaagctctttagtttaattagatcccatttgtcaattttggcttttgttgccattgcttttggtgttttagacatgaagtccttgcccgtgcctatgacctgaatggaaatgcctgggttttcttctagggtttttatggtttgaggtctaacatgtaagtctttaatccatcttgaattaatttttgtataaggtgtaaggaagggatccagtttcacctttctacatatggctagcctgttttcccagaaccatttattaaatagggaatcctttccccacttcttgtttttgtcaggtgtgtcaaagatcagatagttgtagatatgtgacattatttctgaggactctgttctgttgcattggtctatatctctgttttggtaccagtaccatgctgttttggttactgtagccttgtagtatagtttgaagtcaggtagcatgatgcctccagctttgctcttttggcttaggattgactttgcaatgcggggtcttttttggttccatgtgaactttaaagtagttttttccaattctgtgaagaaagtcattggtagcttgatggggatggcattgaatctataaattaccttgggcagtatggccattttcacgatattgattcttcctacccatgagcatggaatgttcttccatttgtttgtatcctcttttatttcattgagcagtggttttagttctccttgaagaggtccttcacatcccttgtaagttgggttcctaggtattttattccctttgaagcaattgtgaatgggagttcactcatgatttggctctctgtttgtctgttattggtgtataagaatgcttgtgatttttgtacattgattttgtatcctgagactttgctgaagttgcttatcagcttaaggagattttgggctgagacaatgggttttctagatatacaatcatgtcgtctgcaaacagggacaatttgacttcctcttttcctaattgaataccctttatttccttctcctgcctaattgccctggccagaacttccaacactatgttgaataggagtggtgagagagggcatccctgtcttgtgccagttttcaaagggaatgcttccagtttttgcccattcagtatgatattggctgtgggtttgtcatagatagctcttattattttgagatatgtcccatcaatacctaattattgagagttttcagcatgaagggttgttgaattttgtcaaaggccttttctgcatctattgagataatcatgtggtttttgtctttgggtctgtttatatgctggattacatttattgatttgcatatattgaaccagccttgcatcccagggatgaagcccacttgatcatggtggataagctttttgatgtgctgctggattcggtttgccagtattttactgaggacttttgcatcaatgttcatcaaggatattggtctaaaattctcttttttggttgtgtctctgcctggctttggtatcaggatgatgctggcctcataaaatgagttagggaggattccctctttttctattgattggaatagtttcaggaggaatggtaccagttcctccttgtacctctggtagaattgggctgtgaatccatctggtcctggactgtttttggttggtaagctattgattattgccacaatttcagatcctgttattgctctattcagagattcaacttcttcctggtttagtcttgggaaggtgtatgtgtccaggaatttatccatttcttctagattttctagtttatttgcgtagaggtgtttgtagtattctctgatggtagtttgtatttctgtgggatcagtggtgatatcacctttatcattttttattgcatctatttgattcttctctctttttttctttattagtcttgctaccggtctatcaattttgttgatccttttaaaaaaccagctcctggattcattaattttttgaagggttttttgtgtctctatttccttcagttctgctctgattttagttatttcttgccttctgctagcttttgaatgtgtttgctcttgcttttctagttcttttaattgtgatgttagggtgtcaattttggatctttcctgctttctcttgtgggcatttagtgttataaatttccctctacacactgctttgaatgtgtcccagagattgtggtatgttgtgtcttttttctcgttggtttcaaagaacatctttatttctgccttcattttgttatgtacccagtagtcattcaggagcaggttgttcagtttccatgtagttgagcggttttgagtgagtttcttaatcctgagttctagtttgattgcactgtggtctgagagacagtttgttataatttctgttcttttacatttgctgaggagagctttacttccaagtatgtggtcaattttggaataggtgtggtgtgatgctgaaaaaaatgtatattctgttgatttggggtggagagttctgtagatgtctattaggtccgcttggtgcagagctgagttcaaatcctgggtatccttgttaactttctgtctcattgatctgtctaatgttgacagtggggtgttaaagtctcccattattattgtgtgggagtctaagtctctttgtaggtcactcaggacttgctttatgaatctgggtgctcctgtattgggtgcatatatatttaggatagttagctcttcttgttgaattgatccctttaccattatgtaatggccttttttgtctcttacgatatttgttggtttaaagcctgttttatcagagactaggattgcaacacctgcctttttttgttttccattttcttggtagatcttcctccatccctttattttgagcttatgtgtgtctctgcacgtgagatgggtttcctgaatacagcacactgatgggtcttgactctttatccaatttgccagtctgtgtcttttaattggagcatttagcccatttacatttaaggttaatattgttatgtgtgaatttgatcctgtcgttatgatgttagctggttattttgctcattggttgatgcggtttcttcctagccttgatggtctttacaatttggcatgtttttgcagtggctggtactgactgttcctttccatgtttagcgcttccttcaggagctcttttagggcaggtctggtggtgacaaaatccctcagcatttgcttgtctgtaaaggattttatttctccttcacttatgaagcttagtttggctggatatgaaattctgggttgaaaattcttttctttaagaatgttgaatattggcccccactgtcttctggcttctagagtttctgccaagagatcagccgttagtctgatgggcttccctttgtgggtaacccgacctttctctctggctgcccttaacattttttccttcatttcaactttggtgaatctgacaattatgtgtcttggagttgctcttcttgaggagtatctttgtggcattctctgtatttcctgaatttgaatgttggcctgccttgctaggttgcagaagttctcctgggtaatatcctgaagagtgttttccagcttggttccattctccccatcactttcaggtacactaatcaaacgtagatttaatcttttcacatagttccatatttcttggaggctttgtttgtttctttttactctctttcctctaaacttctcttctcacttcatttcattaatttgatcttcattcacttatatactttcttccacttcatcaaatcggctactgaaggtattgcatgcatcatgtagttctcatgccatggttttcagctctatcaggtcatttaaggtcttctgtacattgttttctctacttagccattcgtctaatcttttttcaaggtttttagcttccttgtgatgggtttgaacatcccctttagctcagagatgtttgttattactgaccttctgaagcctgcttctgtcaacttgtcaaagtcattctccatccagctttgttccattgctggtgaggagctgcgatcctttggaggagaagaggtgctctggtttatagaattttcagcttttctgctctggtttctccccatctttgtggttttatctacctttggtctttgataatggtgacctagagatggggttttggtgtggatgtcctttttgttgatgttgatgctgttcctttctgtttgttagttttccttcgaacagtcaggttcctcagctgcaggtctgttggagtttgccggaggtccactccagaccctgtttgcctgggtatcaccagcggaggctgcagaatagcaaatattgcacaacagcaaatattgctgcctgatccttcctctggaagcttcgtctcaaaggggtgcctggctgtatgaggtgtcagttggcccctactgggaggtgtctcccagttaggctagatgggggttagggacccacttgagaaggcagcctgtccattcacagagctcaaacactatgctaggagagccactgctctcttcagtgctgtcagatggggatgtttaagtctgcagaaatttctgctgccttttattcagctatgccctgcccctacagatggagtctacagaggcaggcaggcctcattgagctgcggtgggctcctcccagttcgagcttccagaccactttgtttacctactgaagcctcagaaatggtgaacacccctcccccacccagtctgccgccttgcagttccatctcagactgctgtgctagcagtgagcgaggctccatgggcgtgggacccactgagccaggcacaggatataatctcctggtgtgccatttgctaagaccattggaaaagcacagtattaaggtgggagtgtcccaattttcccagtacagtctgtcacgggttccctcatctaggaaaggtaaatcccctaaccccttgtgcttcccggtgacgcaatgccccaccctgcttcagctagccctccatgggctgcatccactgtccaaccagcccaatgagatgaacaaggtacctcagttggaaatgcagaaatcacccatcttctgtgtggatcaggctgggagctgcagaccggagttgctcctattcggccatcttggaatggcaatctatgtttgctttttacatttgaaaaaactggtgtcacgtacctaggtattaatcattgtggtatcctcttgccgatttacctctttatcattaactagtgaccctccttgtcttttgttgttacagtctgtgattttagtctattttatctaatatgagaatagctactctggcacttttttggtttccagcttcatgaaatatccttttccatttccctgttttcatttccctttcggtgtctctatagatgaagttgatttctttaaggcaccataagttgggtcttatttctttatccatttgaccatttagagaatttagaacactgtcagtgttattattcataagtaaaaacttaagagtgggtgtagtggtgtacatctgtatttcctgcactttgagagactgaggcgagctgatctcctggggtcaggagtttgagaccggcctggtcaacatgatgaaaccctgtctctactaaaaatacaaaaattagccaagcatgctggcatgtgcctgtaatccaatttacttgggaggctgaggcaggagaagcttgaacctgggagacaaatgttgcagtgagctgagatcacacagagaagtcatctccactctcctcatcagaacctcttgttcacagcatttgtgagcacaaatcaatgatggttattctttcctactaattagggatattttattacacagcaatagcctccagcaaagggaaccatcatacatgattcctacaagttgacagggctggaattatcactgaaaaactaaggtggctatacttgattcccaatgtccaatttttcatgaatagagaaatttatcctttttccccccagccagaaaccaagttttgctcttacgcccaggctggaatcaagtggcacaatctcagctcactgcaacctctgccccccagcttcaagaaattcaccttttgaacaaggagatattaaggatacactatgtgtatgctaccggtggttgcaggagactcagaaaagagagaaacagtcactggcctcgtgcaactgatattctcgggaggagagaaaggcaatcaagaaagaaacatgctgtatttcagacagctgtaagtcctccacaagaaaagaaagcaggtgaggaacataggaaatgtgtcaaccataaggttcccgctaattctataagttggtcagggatatcctccaagaataagcagcatctgagcaatcacctgaagggaggaaggaaggaagactgtgagtggtggcttacacctgtaatcccagcactttgggaggccaaggagggcagattgcctgagctcaggagttcacgaccactcagagcaacctgttgatacccaatctctactaaaaacacacaaaaaaattacccgggtgtggtggcacgcacctgtagtcccagcttccatgcccagctgatttctctctctccatatatatatatatatacacatatattgtttttgcagagatagggtctcactgtgtcacccagtcatcaagcaattctcttatactgttttggaaaagcatgggaattacaggtgtgaaataccctgctggtcctgaaaaatgtgatatttgggattctctgcctggcttgttttacccaaaataatgacctccagttccttccaggttgctgcaaaagacatgattttcactgttttataactgaatagtattcctgtatgtatacataccacattttctttatttattcttctgttgattgacatgtagggtgattccatgtctttgctactgtaaataatgctgcagcaaatatttgtgtgcattttgatctattcctttgagtaggtacccagtactgcaactgcaggactgagtagttgttatattttttgttctttcagaaatctccatagtgtttgccataaaatctgcactaatttacattcccaacaacaatgcataagatttccccttttctccacattctcactaacatttgttatgtttttgtctttttcataatacccattctgactggagtaagatatctcattgtggtggttgttgatatttttgagacggggtctcactctgttgccagactggagtgcagtggtgtgatcgtggcttgctgcaacctccacctcccgggttcaagcaattctcctgcctcagcctcccgagtagctgggactacaggcgcgtgccaacaggcctggctcattttttgtatttttagtaaagacagggtttcaccatgttggccaggatgatcacagtctcttgagctcatcatacacctgcctcagcctcccaaagtgttggaattacagtcatgaggcagcgcacccaacctcaatgtggttttaatgaccatttctctgacgattcatggtgtggagaatttctttgaaataccttttggccatttatatgtgctcttttaaaaactgactcctgtccaggtgcggttgagcatgcctgtaaccccagaacttcgggaggctgaggccaatggatcacttgaggcaaagaggcagaaatcagcctggccaacaaggcaaaaccccatctttactaaaaatacaaaaaatcagccacgggctgtgactcgtgcctgtggtgcaagttactcaggaggttaaggcacaggaattgcttgaacccggtaggcacaggtcacagtgagccaagatcatggcactgcactacagcatgggtaatagagaaagacctgtctcataaaaacaaatgaataaataaataagataaaaaataaaaaagtctctttatgtcctttgccgactttttaatgggattctttggagttttctgttgtagttgagatctttgtttactctcggtattagtcttttgtcaaaggaaaagtttacaaataatttcttccgttctgcagtttgtctgctcactctgttgagaggattatttctttggctgtgcagcagctttttgtttcagtaaagcttttgaatttatataattaaaattttcagtttggtttaaatttgcactggtcgatttttggttttgttgcctgtacttttgaagtcatactcttgaactctttactagacaataaccagaagagttttctctagttttcttctcacatttttattatttcagtacatatatttaagtctataattcatcttcaattgatttttgtagaaatagtgagaaataggagtccaggtttattcttctgcaaatgacaattcaattgttccagcaccaattattgaaaagggtgtgctttcctcaacgtatattcttatcagctttgtcaaagatcagttggctataaatgtgtggctttctttctgggctctctagtctgttacatcaatctgtgtgtctatctgtatactactaccatgctgtattggtgatgatggctttgtaatataatttgaagtcaagaaatgtgatgctcccagctttgtttatttgcttcagaaaggctgagtcaacagctgcagagatgaagctgcccctcctcgcagggctccttcccggaaaaagatcatggctcccactgaccatataaccatggctggaactcctgaaattcccaaagggaggccctacccagtgaggggggatgaatgaaggtcctacttaaggaatctgtctggccacaatcaggcacagcagctgtgctgccttgtgggggaccagaccacctggattccctggagcctgcaggctagaatgtctgagtccatggaaacacagaaatggaggccgccctcacctccccagaaaactgtagtctcaggcagtctccagccgattgccactggttggctgctattccaagccagtgggtcttaacttgagaggtgctgtggaagtggggcccacggaatgaggctgcttggctccctggattcagccccttttctaagggaatgtacagatggaactcccgccttgcccagctttccaagtatataaaactcctgagtctctgtgagtgtctgagcgagtgctctggcaacattcgacacggctctgtgtatctgacccaagacccttatggcatgagctaatgggaggatcttctgatccatgcgtggcaaagatgcatgggagaaacatggtttgtgggtaggggttgtgcattcactactgcttctcttggctgtaggtgaaggtttctttggctctgtgctgatactgggtgcaccatcacccaccccctttgtttcttctcctgggtcaagtcatttgcctaatcagtcccaatgtaggaacctggatacttcagttcaaggtgctgaattcaccgtgcttttcattcaggggaagacagctgcttctcattgggcatcttggcctgcccacttcacgtcactttttgtaaaatccacaccactccaggaatatccattacttaacttcgcctgaaataaacagaaggctcattacacttatcatgggctcacttacttcgcctataatgaaggtgccatggaaatgctagtggatgacgtggtccattttcttagggatgagatagaaaaatggtgtatggctttttaatttaattaaaatttttagtttggtttaaatttacattggtctctttttggttttgttgcctgtacttttgaagtcttactcgtgaactctttactggacaatgaccagaagagttttccctaagtttcttctgatattttgaccatttcagtacatacatttcagtctataattcactttaaattgatttttgtaaacatggtaagaaataggagttcagatttattcttccgcatatgataatgcaactgtcccagtaccaattattgaaaagggtgtgctttccctagtgtatattcttgtcagctttgtcaaagatcagttgcctatgaatgtgtggctttcattttggattctctcgtctgttacatcaatctgtgtgtccacatttatacctgtaccatgctgtattggtgactatggctgtgtaatatattttagagttaggaaatgtgatgctcccagctttgttcatttgcttcagctgaaaaggttgagtccacaattacaaagatggcagccgcccatccccggaggacctccaacccagaaagagatcaggcttcccaccaaccctataaccctggctggagttcctgaaattccaacagggaggaccttcccagtgaggagggatgaatcaaggtcaaatttaaagaaacagtctggccactatcaggcacagcagcagtgctgccttgtgggggacccctcctgctccagaccagctgccctccctggagcccgaaggctagattgtctgagtctacggaaacagagacggtggccgccccaaccacccagaactcggtagtctcaggcacttggcttgctatcttgccactgcttggctggtattccaagcccgtgggacttgagaagtgctgtgatgatggggaccacaggatgaggctgtctggctccctgtgatatggctgtgatgagtggaggaacaccagggctcatgtctcacacagaattggagaaaatgacacaaacacatgtacagtggttttatggcgtgcagtttaataggcaagaacgaaggaagagctccccatactgagacagagggaggggggctccaaagccaaaagaggaaacccggagtgctgtggataccaatgagttatatgaagaaactggagggggcggtgtctgatttgcatagggttcaggcgattggttcgaccaggcatgtcatttatgtggcccacggaaaaactggccctcccacctagcctttgaatatgcacgtgccggacaccctgatttcctacactcatggggatatatgggggtggccatatcgccaggcacaggtggggacaagggccagaagagggcgggaatcgctatgtttgggtggacccagtttctaatggccggcatctgcagatcaaggttaccggagaactctaaaagccggggctttcctgctagacaagactcatttctggagctgctttaaaaagaaacaaaacttcccaaggaccccttttcctccctgtctgcccaaaataatttcttaacaactcgtataacacctgaattcagcccccttactgggggaatgtaccaacggaactcccacctttcctggtttctcaaggctagattgtgtaaacctcctgggtctcggtctgtgtctgagcagctgctctgccaacactccacacagccctgtgtactaggcccaaggccgccgtgactcagcccatgggaggatctcctgatttcttggttgcaaagatccatgggagaaaaatggtttctggggcggggtcacacactcatggcttctcttggctgtgcaagaaggttcctttggctctgttccaatatagcgtggttcatcacccacccctgttttctttgttctcctgagtcaagttgtttgcctagtcagtcccaatgtgagaacctgaatatttcagttcacgtgcttatcgtgaaattcactgagactttaattcagtggaaggcagcctcttctaattggccatcttggcccgccccctccacgtcacctcccataaaatggccacgctctccagggacgatgccattatatatctttacgtgaaaccgacagaacacttattacactttttgtgagctcatttacttcacttataatgaacatggccatggaaatgctagtggagaaagtggtcgattttctgatggatgtgataaaaaaatggtttgccgaccaattaatgacatatgtctcaaaactagtaacgagacccttaatcgctgggttgaagtttctaatcaagaagatgctcatctatgtattcaacaaagcagcttcccttgcttctgaaatgcttccaaacaacatctcatatttcctgaagaagataatgcctggacaagcagcacaagtcattcaggtttactttcagctcataaatccagcaggatattcgcacaattgttgggaaaccttatcagttcatgagtcgtgcatgtttcctttaatttcaggaggaagagggtaatctggaagagtttcctgacctactctgctgctgtgattaaacaaccaccaggaaattttgatgacactgttctcctgagctcctccctttcctcggggaagaaaagcattgaaactacaaaaataaagtgttatttggctggagtgaggtctcatgtctgcttatgcggtggctcgctgctcagaacagggtgagtctctgagttgtacgctgaggaggggaggctgtcaatctagaaaaaacccattgcatgggacacctccatggggtctggggggctgaggatgaggagctggactggatctagggaaggaggaggtttcagagggtgaaattctggcagtaaatcctgggggtgtttgaaaacttcctccctcagaaggagaagactcagggaggaataaggacaaaccatgggtcccttgaggggcatttactaacttaagaggactttatcgggaagcagagtgacaatggcctccttgaggactgaggcccctggataaatgaggcccagatccagatccagtccatgggagatgagaccttcaagggacatatttttgttgggacagaggaaaagtgcagctctgcagctgcagaggaagccttggcagtgtgaaagcgaccttggagggggccctgtgcgttctgaatgcttctgaggtccatcccctgtccccgcctctttttctggattttttgggctccatggtctccgccatcttctgagcgctccacgctgccaccttcagttttctcttctgggctccaaatactccaaaatctttcatatctgtgcccctacccctgtttttagcatgtgttgggactccaggtccctgaaggtttctggcctgaaatccacctccccagcggtgtggattctgctctagagaccccgcacttggcaaggttcccaggcccctgggggacaaccgagtggtatgtgcacttcagggctccacactcggcaaggtctttcaagcccttggggttccctcctcagttttcttcacatgtctgggatgtagtcactctataaatgccgggatgtgatccccaccccagtgattttttttagttccatgagtgttgctatctgaatagtcatcctgagagtgatgggaccttttgaatttgcagcaagttttagattagtgtgagtggcctgagatcgcaaaactggggctagcattggatgtgaggttaggctggtggaaaaatttgcccagaacctgaggagtgtgggctcactgcaggtggttaggatcagcacagaattgcaaggatgtatagctttggggtaaagaataacatggttcagaagtacatgtattagtcttttcatgcattgctataaagaattacctgagactgggtaattaattataaaaactcaggtttaattggctcatggttccacaggctgtacaaaaaggatgatgctggccatcagctcaacttctggggaggcgtcagaaaacttagagtcatggcaaaaagcacaagggaatcaggctcatcctccatggccagagctggagctagtggtaggagaggtgctgcacacttttgaacaatcagatctttttagaactctatcaccagacagcacctagaggatggtgctaaattattcatgaaatatccacccatatgatccactcaattctcaccggcccaaccaggaccacctccaccattggggattacaattacacatgagatgtgggtggggacacagatccaaactcgatcagtgggcatcttggactgggtctactatagaagaagaaccaggagctgactatcatccttaagactgcccatgatggccaggcagggtggctcatgcctgtaatcccagcactttgggaagccaaggtgggtgaatcccctgaggtcaggagtttgagaccagcctcgccaacatggtgaaaccctgcctctactaaaaacacaaaaaattagatgggtgttgtgccagacgcctgtaatcacagctactccagaggctgaggcatgagaattgcttgaacctgggaggcggaggtggcggtgagccccaatcgcactgctacactccagcatgggcaacaataccaaaacatcgtctcaaaaaaaaaaaaaaaaaaaaaaaaggctgcccatgaccactgccccagtgagagggacaccagcatggctaagatcaagtgctggacattcttcatgggtcagacattaaagcaggccacactgttacagagatgggctccattcatagcaacaaagtggtgagaagatgtgggaatggcagaggccagcactttgccatcaatgcaaggtgggcataaggagctggcaccagtgccagagtgcatcaggggaggactgctttgcaatatctagcacttacctcttagagtatgtttcattagggacaacagatataaatggcagacaagtgagtcccttcagtaacaggaaatagaaatcatcaagaggaacagaaacagatgtcagcagccctcatataaagtcatcatccttcatccagttaaaacctgagacagttctcacataagaaggtctaattcaaaaagagactgggttctcatgaggcaggttcatgcaaaaccaagggaagtatacaactttgggattctccagcttcccttggaaaagacctacaatcatttgcttaggtaactgagcactgaacaaaggtgagtattgttatctttcagaagctgttggccatgaaggtcttgctggcataaaacccatggttggaaacatcaccatgacccctgttagagtaatggcctaagggcaagggtcaggaaattgatgtattccttgccaacttctgcgagacgagtgttggtccactcatctctttcacggaattcaccagtctggtatcttcaaaatccagaaggatgatggcagatggcaggaaactaatgcaaacaccatcagttgtacctccactgtagcagcagtaatggatgttatctcttcattgtaatatccagggagggagaagatgacattattctcaatattctaaacaccctgtgtgtacagcctctgtgatattttttgtaatatccgtgtgggagagaattatattactcctaatatctcaggggttgtgccccctctgtgacaatgttcctaacacccaggaggggataggatgatatcacttttagcatcacagggggtgtacaccccactgtaatattgttcataatatccgggggggagagaatgatattactcccaatatcgcaaagactgtacaccaacctgtgatattatttgtaatatccataagaggaagaataatattactcccaatgtcacaggaagtgtacacccttctgtgatattgttcaaaagatccagttagggaggggatgatattactctcaatatcttaaacaccctgtaggtaagccctctgtgatattcctcataatatccagagggagaggatgatattactcccaatattgcatgaagtctacaccccacctgtgatattgttcctaatatccaggatgggagaggatgatattactcccaatgtcgcaggggatgtacaccttccctgtaatattgttcgtaatatctagaaaaggagaggataatattactttcaacatcgcagggggtgtacaccttccttgttatattgttgctaatatccagggaaaaagaagatgacattaccaccactattgcagaaggtgtacacccccccttgatatagttcctaatatccagaaaaggagaggagatattactccaaatattgcaagaggtgtacattcccctgtaatatttttcctaacattcaggaagaaagagagtgatattgcccttaatattgaagggagtgtgccccccccgtgatattgtttctaatatccaagaaatgaaaggatgatattactcccaatatcacaggggctgtacagccccctcccatgatattgttcccaacatcggggggggggtgaaatagtattattcccagtatcacaataggtgtacacacctgtcgtgatattgttcctaatacccatgggggaaaggacgatattattcttaatatctcagagggatgtacaccctccctgtgatattgttcctaatatccggggtgggagaggatgatattacccccaaaatctcaaagggtgtacacccctcttgtgatattgttcctaatatccagggtggagaggataatattattcccaatatccaggaaaggaaacgatgatgttactgtgaatattccagggggtgtcctcccctctgtgatattgttcctaatatccaggttggggagattatgatatttctccaaatatcacaaggggtgtacaccaaccctgtgttattgttcctaatatcgatggggggagaggacgatattactcccaatatcacagggggtgtacaccacctttatgatattgttcctaatatccatgaagaaagaggatgatattactttcaatatcgcaggggatgtacactccccctgtgatattgttagtaatacctaggagaagaaagtgtgatattactcccaatatcgcaggggatgtacacgcttcctgtgatattgttcctaatatttagggggaaaggggatgatattactcccaatatcgaatggtgtgtacacccccccgtgattctttttttttttttttttttttttttgagatggagtcttgctctgccgcccagactggcgtgcaatggcgcaatctcggctcactgcaacatttgcctcccaggttcgcacgattctcctgcctcagccttcggagtagctgggattataggcagctgtcaccataccaggctaatttttgtatttttagtagagttggggtttcaccatgttggtcaggctggtcttgaattcctgacctcaaataatccacccaccttggcctcccaaagtcctgggattacaggcataactttccctgtgatattcttcctaatattcaggaagaaagaggatgatattgctcccaatatcgcagagagtgtgcactcctcctgtgatatggttcttaatattcagaggaggagaggatgatattactttctatattgcagaaggtgtacacctccctcgtgatgtctttcctaatatccagtgggggagaggttattagtctcaaaatcacagaaggtgtaaacccccatttgatattgttcctaatattcaggggtggggagagaaaggtattactcctagtatttcagggcatgaacacccccaccgtgatatcattcctaatatccagaaggggaggcaatgatatttctcctaatatcacaaagggtgtacaccccttctgtgatattgtaaatattctgtgtgtacacccccctgtgttatagtctgtaatatccgggtgggggagagggtgatatttctccccatattgtaggggatgtacacccttctgtgatatggttcgttatatccagggaagaaaaaggtaatattgctgcccatattgtggagagtgtacacccccatgtaatatggttcgtaatatccaggagtggagagggtgatactgctccttacatcgaggaaggtgtacaccttattgttatatgattcgcaatatccaggggaggagagagtgatattgctccccatgtcgcagggggtgtaaaccctccgtgatatgattggtaatatccaggaaaggaaagggtgatatttctccccatatcgcgggggacgtacatcctcctgtgatatggttcgtaatatccaggaggaaagaggaaaatattgctcttcataacccgaggggtgtacaacccctgtgatatggttcgtaatacccagaagtgtacacccctctgtgatatggtttgtaatatccagggggttagagggtgatattgctccccatatcgcagtgggggtacacccccctggattggttcataatattcatggggggagaaatttacatttatcctcatatcagggggggtgtacaccccccgtgatatggttcgtaatatccaggggaagaaagggtgatattgctccttatatcgcggaaggatcaccctcccctgtgatatggttcataatacccagacgggaagagggtgatattgttcttcataaagcgaagggtgtacagccccctgtgatatggttcataatatgcaaaaggggagagggtgatattgctccccatatcacggagggtgtactcccttctttgatatggttcgtaatatccaggggtgtagatggtgatatagctcgccctattggggagggtgttcacccctctgtgatattgttcgtaatgtccagggaaagagaggatgatattactcccaatatcgcagaaggtttacaccactctgtgatattgttcataatatccagggaaggagaagacgatattactcccaatatggcagggggtgtagaactcctgtgatattgtttgtaatatccaggcaaggagaggatattactctcaatatcgcagaaggtttacacccctatgtgatactgttcatgatatccagggaaaaagaggatattactccctatatcacaaagggtgtacacccctttgtgatattttttgtaatatccaggggagagaggataatattactctcaatatcagaaggggtgaaaaccctcctgtgtcattgttcataatatttagggaaggagagagtgatattactccaaatatcacagtgggtgtacacccccctatgatattgttcctaatttccagaaggggagatatgatattattgccaatatcgcagaaggtgtacaccttactctgacattgtttgtaatatccagatggggaaatgatgatattactcctaatatcacagggggtgtacacccccttgttttattgtttgtaatattcaggggaagagacgattatattactcccaatatcgcagggtgtgtacaacactctatgatattgttcataatatccaggggaggagaggaagtgtacacccccccgtgatattgttcgtaatatccagaggtagagaggatgatattactcccaatattgcaggtggtgtacacctttctgtgatattgtcatgatattaagaaggggagaggatgatattactaacaatatcacaaaaactgtacactccctgtgatattgttcataatatccagaagaagggaggatgatattattctgaatctcgcagaagatatacaccaccctgtgatatggttcataatatcctaggggaaagaggatgacataactgtcaatatcgcagggggtgtacaattccctgtgatattgttcacaatattcagagggaaaaaggataatattactttcaatatcgcaggcggtgtacacattactgtgttattgtttataatatccggaatgagagaaaattttctcccaatatcacaggaggtgtacactcccctgtgatattgttcgtaatatccagggaggggagaggatactattactcccaacatctcagggagtgtaggccccccctttgatattgttcctaatattcggaagtggagaagatgatattacttccaaaatcgcagggggtgtacactccctctgtaatattgtttctaatattcatgagtggaaagaaagatattactcccagtattgcaggggacatacaccacactgtgatcttgttcacaatattcgggggggagaggatgatattactcccaatatcaaagtaggtgtacacccccttctgatattgatcgtaatatccagaattaaagatgataacgttactcccaatattgcagggggtgtacatttttgaatactgttcataatattaagagggggaggggatgatatctgtcccaatatcgcaaagtgtgtacacctcctgtgacattgtcccaaatatccagaggaaaaaaggatgttattactcttaatatctcagagagtgtacacctccctgtgatattgtttgtaacatccagaagaaagaggctgatattactcttaatatcgcagggggtgtacacccccgccccgggatattattcgtaatatccagggggaagtggaatgttcagaatgggagaggatgatattacttgcaatatcatagtgggtgtacaccccactgtgatattgtttgtaatatccgggaaaggagaaaatgacattcctccccatatggcaggggctgtacaccacctatcatattgttcaaaatatccagaaggggagaggatatgtctccaagtatcacagggggtgtacaccccgctgtaatattcttcctaatatccagggtgtgagaggataatagtactcccaatatcccagggcatgtacaccccccttgtgatgttgttcctaaaattcatggggagaaagaatattactcccaatatcacagggggtgtacatacactctgtaatattgttgccaatatgcagcaggagagaggatgatattactcccaatatcacaggggctgtacaccccgctgggatattgtttctaatatcaagggggaaaaaggatgatattactcccaatgtcgcagggtgtgtacttcctctttgtgacattgttcctaatatccaggagagaagagggtgacattccttccaaaactgaaaggggtgtacacaccctttgagatattgtctttaatatccagaacgaaacaggatgatataactcctaatactgcaggggggtacaccctctctgtgatactgtttctaatatccaggaggggaaagaaaaatattaatcccaatatcacagggggtgtacattccccctttaatattgttcctaatatccaggaagacacaggatgatactatttccagcagcacagggcatgtacacccctttgtgatattgttcctaatatccaggaaaagagaggatgatattactgtcaatattgcagggcgtatacactggttctgtgatattgtttctaatatccgggggtggagaaaatgatattactcccaatattccagcgggtgtacacccgttctatgatattgttcctaatatctgggggagagagaatgatattattgtcaatatcacaggggatgtacagattccctgtgatattgtttctaatattcacagggggagaagggtataatactcccgatatcgcagggggtgtacactccccctgtgaagttgttcctaatatccagggattgagagaatgatattactcccaatatcacaggcggtgtaaaccccctgtgtgatattgttcctaacatccagaggaaaagatgatgatattattttcaatatcacagggggtgtacgcatccctgtgatattgtttctaatatccaggggaggagaggatgatattattgttaatatcgcagggggtgtaccccaccctgtgatactgttcctaatatccggggtggaagaggataatattgctcccaatatcgcaaagggtgtacaaccttcctgagatattggtcctaatatccagggagggagaggatgatattactttcaatatcacagggagtttacacaacccctgcgatattgttcctaatatccagcggaagaagagttaggataatactattttcaaaattgctgggtctgtaccccctccccgtgatattgtttctaatatccaggaggggagaaagtaatatgactcccaatatcttagaagatgtacaccctccccataatattatttcttacatccagggggtagaggatgattttgctttcaatatcacagagggagtaaacctttccggtgatattgtttttaatatttaaaaagagagaagataaaattactcccaatacaaaggggatgtattgtgtactcccccctctgatattcttttttaatatccagatggagagaggatgatattactttcaatattgcatgggatgtataaatcccctgtgttattgttctgaatatacaggtggggagagtatgatattactccaaatatcgcagggggttctttccccctgtgatattgttcctaacattcagggagggagaggatgatattactcttaatattgcagggggtgtacccacgcctatgatattgttcctaatatccagagggggagaggatgatctaactcagaatatgacaaggggtgtacacacagcctgtgatatggttcctaatatacaggggagaaggggataatatttctcccaatatcgcagggggtgtacaaccccctgtgatactgttcctaatatacagaaggggacagcatgatattgttcctaatatcgcaggaggtgtacaacgccctgtgatattgttcctaatatccagggcgggagaggatgatattaccctcaatatcgcagggggtgtgcactttccctgttatattgttcctatgatccgggtggggggaaatgacattagtcccaatatcgcaggatgtgtgcaccgctcccccgtgatattgttcctaatatcaagggggagagaggaggatattactcccaatatcgcaagggatgtacatcctccatgcgatattgttcgtaatattcaggaggagagaggatgatattactcttaatatcgcagaaagtggacacccaccctgtgatgttcttcataatatccagggaagcagacgattatatgactttcaatatcgctgggagtgtacatcccttttgggatattgtttctaatatccaggaagggagaggattatattactctcagtattgcaggcagtgtacaccttttttgtgatattgttcctaatattcagaaagggaaaggatgatattactcccaatattgcaggtggtgtatatccccctctgatattgttccttatatcaaggaagagaaagaataatattactcccaatatcaaagacagtgtagacccctcctgtgatattgtatttaatatccatggggaaagaggatgatgttactcccaatatcgcagggggtttacacccacactgtgatattattcctaaaatccagtggaggagaaaataatattgctcccaatattgcagggtgtatacaggccctcccccgttatattgctcctaatatccagcggtggagaggatattactttcaatttgtgtagggagtgtatacccccctgtgatatttttctaatatcaaggatgggaaaggatgacattactcccaatatcgcaggaggtgtacacgccctgtgatattgttcctaatatctagggaaggagaggatgatattactttcaatattgcaggagctgtacaccctctgtggtattgttcttaatatttaggttgggagaaaatgatatgagtccaaatatcgcagaaggcatacacacttccaataacattgttcttaatatccgggggagagggtgatattactcccaaaatctctggggggtgtacacccccttctgatatttttcctaatatccagggaaggaaacgatgatattactataaatattccaaggagtgtacaccttcctaatatcctaatattgttcctaatatccaggggtgggagaggattatattactcccgatatcgcagtgggtgtacacccctcctgtgatattgtttctaatatccaagctaggagaaaatgatatcactctcaataccacagggggtgtacaccttccgcatcatattgttcctaatattcagagggaaagaagatgaagttactttcaatatcggaggggttgtacacaacccctgtgatattgctgctagtatccaggaagaaaggggattatgttactccccttatagcagggggtatacacctcccctgtaatattgttcctaatatcaaggctgggatatacgtggggggaaggatgatattactcccaatatcgcaggggttatacaaccttctgtgatattgctcctagtaaccagggcagaagaagatgatattactcctaatatcgcaggaggtgtacactcccccattatgttgttcccaatatgcagaaaaggagaggatgacattattgccagtatcgcagggtgtgtacaccacccctgtaatattgttccaaatatttagggggagagaggatgatattactcccaacatcgcagggggtgtacacacatcccctgtaatatagttcttaaaatctaggggaaaaggggatcttatttctctaaatattgcagagggtgtacactccccggtgatattgttcctaatagccgggagggagataattaaattactttcaatatctcagagagtgtacatcgcccttgcgatattgttcctaatatccagagcaaaagagaatgatattactcccaatatcttaggagtgtacatttaacctgtaatattgttcctaatatccagggggaagagaatagtattactgccaatatcgtaggggttgtacaccttttctgtgatattgttgcaaatatttagtagagggaaagaatattactcgcaatatcacagggaatgtatacttcccctgtgatattgttctgatatccagaaaaagagagggtaatattactcccaatattgcagggggtgtacaccccccttgtgatattgatcctaatataaaggaaggaagaggatattactcctcatatagaaggggttgtccaccccccttgtgatattattcctaatattcagggaagcagaggatgatattattttcaatatcacagagggtgtgcagtccacctgtgatattgttcttaatattcggggggagaggatgttattatgcctgatatcgcagtagaggtacacccctcaagtgatactgttcctaataaccaggggtgaagaggatgatattactcccaatatcgcaggtggtgtacacccccccatgatggtttctaatatacagagggggagaggaaaatattactcccaaaatcgctggaggtctacaccccccttgtgatattgttcctaatatccaggaaaggaaacgatgatattactgtgaatattccagggggtgtacacccgctttgtaatattgttcctcatatccagggtgtggagaggattatattactcccagtatcgcagggggtgcacgacgcccctgtgatattgtttttcatatccaggaggggagattattatcaatatggcaaggggtgaacaccccctgtgatattgtacttaatagttaggttggcagaaaatgatattagtctcgatatcgcagggggtgtgcactccgcctggtgatattgcttttaatatcaagggggagaaaatggcattactcccaatatcgcagggggtgtacaccgctcatgtgatattgttcctaatatccaggtggagagaacataatattactcccaatatcgcacaaggtgtacacccctcctgtgatatggttcctaatatccatgggaggagatgatgatattactcccaatatcacaggggatgtacaccacccttgtgatattgttcctaatatccagggaagaaaacgatgatattattgtgaatattacagggagtgtacacactccctgtgatattgtttttgatatacagggtgggagaggatgatattactcccaatatcacataaggtgtacaccccccgtgatattgttctaaatatttcggtggggagaaaatgatattagtctccatatcacagggggtgtgtgctcctcaggtgatattgtttttaatatcaagagggggaggagattatattactttcattatcacagggggtgtacacccctcctgtgatattgttccttatatccaggcgaggggaaaataatattactctcaatatcgcaggaggtgtacacaccccatgtgatattgttcctaatattaagggggaaagaagataatattactttcaatatcacagggtttgtactcctttcttgtgatatagtttttagtatccagggggaaagagcatgatattactcccattgtagcaaggggtgtacacacctcctgtgatattgttcctaatatccagaagtggtgaggatgatattactcccaatatcgcagggggtatacaccccacctatgatattatttctaatatccatgggaaaagagtatgatattacacccaatgtcgcagagggtgtgtatttttcctgtgatattgtttctaatattcaggcggggagaagatgatattactctcaatatagcagaaattgtacatccccgctgtgatattcttcataataatcagggaaaaagaggatgatattactaccaatattgcaggggggttacacttcccctatggtagtgttcctaatatccaggaagaaagaggatgatattaatcccattatccaggaagtgtacacccaccctgtcatgttgttcctaatatccagcagggaagaggatgatattacaccccccccccgtgatattctccttaatatccaggaggggagaggctgatattactggatatatagcaggggtgttcataccttctgtgatattgttcctaatatccagaaaaggagaggatgatattacttccaatatcgcagaaggtgtacacctccctgtgatattgatcctgacattcagaaggggagaggatgatattactcaaaataccgcagggcatgtgcattcccttgtgatattgttcctaatacccagaagggaacaggataatattactttcaatatcgcagggagtgcacacccccctttggtatggttcttaatatccagaaggaaagagggtgctattactttccatattgcaaggggtgtacaccccactgtggtatggttcataatatccaggcagggagagggtgctattactccccacagtgcggggcatgtacaccctgctgcggtacggttcctaatatccagggggagagaggatgctatgactccctatatcgcggggtgtgtacacccctgtgtggtatgttttgtattctccaggaacggagagggtgttgttacccctcatatcgctggaaatgtacactcccctgtggtatggttcgtaatatccaggggattgagggtactgttacccccatactccccatatcgtggggggagtgcacctccctgtggtatggttcgaaatatccagggtaagagagggtgctattattccccattttgcaggaggcgtacacccccctatggtatggttcgtaatatccggggtgaggggatgctatcaaaagaagagagaaagagaccccccatattgttctatattattttatactcagtacctgttttaagaagaaacaaggaagtgaaaccaaaagcaggcagcccggcgccaggcaccagacccaaaaccagacccgaaaccaggcctgggcctgcctgaccttagcctgatagttaaaattcaacccatgacctagcaaccaatgttatccatagattccagacattgtatggaaggacattgtgaaatttcttgttctgtgctgtttcactctgattaccggtgcctgcagcccctgtcacatacccactagattgctcaatcaatcatggccctttcatgtaagatctttagtgttgtgagcccttaaaaaggacagaaattgtgcactcaacaagctcggattttgagacgctagtctttcgatgcttccagctgattaaaagccacttccttcactacctcggtgtctgtggggttttgtccgcgactcctcctgctacactatgactccccatatcaaggggggtgtacacccccctgtggttcgtaatatccagcaggggaaaaggtgctattactccccatattgcagggagtgtacacccccttgtagtatggatcgtaaaatcaaggggggagggaaggtgtaattatccccatatctcagggggtgtacacccctttgtggtaaagtttgtaatatccagggatattacagggatattatccccaaattaatacttttataatttcttatgcctgcctttactgcaatctctgaacataaattgtgaagatttcatggacatttatcacttccccaatcaatacttttataatttcctatgcctgtctttactttaatctcttaatctcatcatctttgtgagctgaggatgtatgtcgcctcaggaccctgtgatgattgcattaactccacaaattgtttataaaacatgtgtatttgaacaatatgaaatctgggcaccctgaaaaagaacaggataagagcgatgttcagcgaacaagggagataagcataaggtctgactgcctgtggggctgggcagaacagagtcacatttttcttattgcagaaaatgagtaggagaaatatcactgggaagggaacgcattcctaggggaggcctatggacggccgctctgggggtgtatcccttatgtggttgaagataagggatgaaatacaccctggtcccctgcagtgccctcaggcttgctaggattagaaattccagcctggcgaattctagtcagaccagttctctgctcttgaaccccgtttcctgttaagatgtttatcaatgacaatgcgtgcacagcaggacatggaacctcaatagtaattccattttctccctggccttgtgaccttgctaggcccttctgcccttgtgatcttttattgccatttgaagcatgtgatctctgtgacccactccctattcgtatccccctccccttttgaagtccctaataaaaacttgctggttttgcagatcaggtggtcatcacagaacctgccgatatgtgatgtcaccccggaggctcagctgtaaaatttctctttcgtactctttcactttatttctcagaccaggtgacacttaaggaaaatagaaaagaacctactttgaaatattgggggctagttcccccaatagacattgttcctaatatccagaaaaaaagaagatgatattactcccaatatcacaggggttgtgaaccccacctgtgatatggttcctaatatccaggaagggagagaatgatattactctccatattgcagggggtgtgcacatccctgtgatattgttcctaatatccaggggaggagagggtgatattactcccaatattgcaagggttgtaaactccaccctgtaatattgctcctaatatttaggatttagggggggagaggataatattactcccaatatcgcaggggatgtatatgccctctttgatattgttcctaatatccagggggggagaggataatattactttccatatcacaaagagtgttcacccccctgtgatattgttcctaatatccaaaaaggaagaggatgatatcaatcccaatatcacaggaagtgtacaccccccccttttatattgtttctaatatccaggggaaatgagggtgatatttctctcaatatagcagaatgggtacactccccctgggatattattcctaatatccaggggaaaaaaagaggttgatattcttcccagtatagcagggaatgaatacaccctttgtgatattgcttctaatatcaaggggaaaagaggatgatatgactcccaatatcacaggggatgtaaacctgtggcgttgttgctaatatcaaggagggaagagtatgatattactcctaatgtcgccgaaggtgcacactttccctgtgatattgttcctaatatccaaaagggaagagaatgatattacccccagtattgcagggtgtacaccacccctgtgatattgctcctaatacccaggaaaaaagagaatgctattacccccaatatctaaggggacgtataccttccctgtgatattgtttctaatatccaagtggggagaggatggttttactctcaatattgcagggagtgtacactccccctgtgatactgtttctaatactcgggctgggagaaatagtattactcccaatatcgcagtgatattgtttccctgtgatattgtttctaatatctagtgggggagataattatattactaccccatacacaggggagggtgtacattcccctgtgatattgtttgtaatatccagggaaggagaggatgttactcccaatatcacaggggttgtacaccccttttttgatattgttcctaatatctggggggcagagaattatattactgtcaatatcacagagtgtgtacaccccctctgttatattactctttatattcagggcggtagaggatgatattactccctatatcacagggggtgttcacccctcctgtgatattgtttataatatctaaggggaaagaggatgatatcactctcaatatcaaaggaaatgtacacctttcctgtgatattgtttttattatataggggggcagaggatgatattaagaacaataccacaggggatgtacacccacgtattgatattgtccctaatatgtatggggaaagaggacagtgtaactcccgatatcgcagagtgtgtacacccccttgtgatattgtttctgatatacacggggagaaaagataatatttcttccaaaattgcagggggtgtacaaccccctgtgatattgtttttaatatccagtgggggagagaatattactcccaatattgcagggcgtgtacacaacccctgtgatattgttcctaatatccagagtaggggaggatgacattactttcaatatcgcaaggggtgtacattcccctgtgatattgctcctaatatccatgaggggagaggatgatattattcctaatatggcaggggctgtacaccttccctgtgatattgtttctaacatccagtgggggagaaaatgatattactccctatatcacagaaggtgtacactttccctgtgatattgttcctaatatccagaaggggagaggataatattactcccaatatcgcaggaagcttacaactcccctgtgatattgtttctaatatccagggaggtagggatgatattactcccaatatcgcaggggatgtacactcccccgtgacattgtttctaataaccagggggtgagaggatgatattacgcttaataccgaagggggtgtacacacccttgtgatattgtgcctaatagccagggggaagaaaattatattaattttaatatttatggggaaaaaggatgatattactcccaatatcacaggggctgtacaccgaccttttgatattgtttttaatatccagaagagaagaggataatattgctcccaatatcagaaaaggtgtaaaccccttctgtgatattggtcctaatatccagggagggagagaataatattactaccaatatcacagaaggtgcccacccccaaggtgatattgctcctaatatccaaagataatagggtgatgttactcccaatatcacaggaggtgttcacaccccttgtgatattgtttctaacgtacagggaagggagaggatgatattattcccaatatcacaggaggtgtatactcctctgtgatattgattttaatattcggggggaaaggatgatattactccctatatcgcagagggtgtacaccctctgtaatattgatcctaatatccagggcgggataggatgatattactcccaatatcgcagaaagtctacacaacccccagtaatattgtttttactatccagggggaagaggatgacattactcccaatttcacagagtgtgtacactcaccatttgatattgtttctaatatctagggggagagaatatattactcccaatatcacaggaattgtacaccacctctgtgacattcttgtgaatatccggggaaaaagagaataatattactcccaatattgcagagcgtgtacacccctccatgatatcgatactaatatttttttaaagaggatgatattactcccattgtcacaggatgtgtacaccccccttgtgaaattgttcataatattctggggggagagcataatattactccccatatcgaaaaaggtgtccaccctccttataatatggttcctaatatccaggatattacttaatccaggatacttgtaataccctaaatatacaattgcttgaacctccacctcccaggttcaagcaattcttctgcctcagcctcccgagtagctgggactacaggggcacaccaccacacccagctaatttttttttcttgtatttttagtagagatggggttttgccatattggccaggctggtctcaaactcctgaccttgtgatctgcccacctcagcctcccaaagtgctgggattataggcgtgacccaccgtgccaagccaggaagaggatgctctatagatttccccaataagagatggctttgcagggccattccaaaatatgtcaaagaaatacatttggggataaaatactttgatttcctttagggaatgttatctattatgtgatgctataccagagtcaggttggagtcggttatcttattgcaacaaagagtctgttccgtcactgttgggatctctattttttcctcttatttcttgagacagggtctcactctgtcacccagtctggagtgcagtggtgcgatcttcattcactgaaacctctgcctcctgtgttcaggtgattctcgtgcctcagccccttaagtaactaggattacaggtgtgcgccaccacacccagctaatttttgtattttcagtagagatggtattttgccctgttggccaggctggtcttgaactcctggcctcgtgtcatctgcccacctcgacctcccaaagtgctgggactgcaaatgtgagctattgtgcccagccaggatctctgttttaatgttagtgctggtcactttgcatgaactccaaagggaagaaatataatgaggtgtgtctgaccccctgccttctcatcgtgacctgaattagtttttcaggtttgcaggggatacccttggacaagaaggggctctattcggttggttggggggattagaattttactttttgtttacaatatttctcctgaaagagttaggggctcacaaggaatttccgcgtgagcaacttatgaggaaagccatctgggaagatatgtgtccttgtgtcactgggatattctcgtttaccccaatgatacggcaatgacgcagggttgtgaaattacagctatgtgtttggggaaaaaagaaagcaggattgtgtgactacgtttccaaacttcacttgcccttagccatagtgagttgggggcctggagattctgttttctttcacaatgatatagatacaattaaatgtatagaaagcaaaaaaataaaaaggtgagtaatgaggaacctctgattcctgagtggccatgtagttacccatggcacagagccacagttactgaaggtaaagtttgctggggaatttagaaatgaatccagctcttggaggagtcagtttactggatgcctaagaaaatgcaaacaaaataagaaaaaagggtaatattcaatcccatagttattgttacctgtcatagctaaagtaaaattaaaacagagtgctggcttcaatcttgatgctacactaagcttagatttcagtgaatgtgagtctcagccactagctcagagccacctcccaaagaccaaatcatgtagggacaatagaaagtacttctgagaattgtggttaccaagaacctagtaactgttggggaggagcaaaacaaagtacagaaaccagagggtacaatctgagtgagactgctatcagcttctggaggagcctttactaaaatgaatgatgagagtaactggatgatgagagtaactaatggatgatgagagtaagcaatgtctttggttttcttttttttttttttttttttttagcagacgtctcactcttgtcgcccaggctggagtgtaatggcatgatctcgcctcactgcaacctccacctcctgggttcaagcaattctcctgtctcagcctcccgagtagctgggactacaggcactcatcaccacacctggctaatttttgtatttttagtattttctggtgagggtccaggtttccggaaacaactcagagacatatgttaagatgttatctttagttttcacagggaaccaaatatgttacgactccaatttccttggctattgttttaagttaccattaccttctcgttgatcaagttgctcatttacttctcaagcctagctagatgcctggaatttcccttgaaggaagtcaagattttcctttatctccatactggctgatggtgatcgagtaagcccctaagaggggtccctgctccatctcgagatgctgctagattctacagtgcctaataaacagctctcgcctggccgacaaagagctgcttgctctctggatagcaattccaaagtgaacagacaacatcctgtttggaagactgccactctgttagaagaagcatcaggaaaacctttcttttgagctatttataactaacagcaattgaccaagtatacttttgtgagtgaaactgacctttctccctgtaagaattctccaaaatttggaaactatttgtgagtatttttacttatggcaatataattattggcacaagctcaatcagattcggttttctttcgtaacaggaaccattggagatactcattactctttgaaggcttacagtggaatgaattcaaatacgacttatttgaggaattgaagttgactttatggagctgataagaatcttcttggagaaaaaaagactgggtatattttcaatatgctttccttttaaggtccctcacctgtggaaagtaaagaatgtcactttctgacaggctcaggaacctcaagttatgtagggatctcaagaagatgggggaattcacccagttcatacaggtgaaattgctgttgcaaagattatgaatatgagagaagtccagcatggctgacttcatctcgtgtctggcctcaggctggctgcccttgctcactcttgggcataggccaagctagccatgggaggaatttagtttatagtttaactttgaagcacggatgataatagtctctccctaaaatgaaccccttccttgctcagggactgaaactacctttgtatgacaaatgaaagcccacaagattaagattatgagaggggcctgaattctgctaaaatgcaggtgtagctgactgataacaagtcattgtcccacagcttgcctttctataatctcttgcttctcaggagtcacatggccagaggtcctgagatttccagtcctgtgacccccacccagagatggacttagtgcatgaggaccattttccacacccctatgatttcatcctcaaacaatcagcagcaaccattccctagccccctgccttccaaattatccataaaaatcctagcctctgagttattagggagattgattaataatcccagtcctaccccttgggttgctctgatttaattaaaccttctctactgcaataccacggactcagtaaattggttttgtctgtgcaatgggcaagaagaacatgttgcatggttatacaggtactacaagcacagtctgatggcaaattattggttttgcttcctgcccttgatgtttctaaacatctagtccaaaattacttgtgaaaggtccagcaaagccaattttaaaagaggctatatggccaatcactattctttctacacattattgcaaataatcaggccacggctgggcacggtggctcatgcctgcaatcccagcactttgggaggctgaggcaggatcacctgaaatcaggagttcaagaccagcctaggcaacatgataaaaccctgtctctactaaaaatacaaaattagccaggcatggtggcatgcacctgtaatcccagctacttgggagactgagggaggagaatcacttgaacctgggaggcagagattgcagtgagctgagatcacaccactgcactccagcctgggcaatagagtgagactttgtctcaaataataataataataatcagaccaagtataatgaaattaaaatttattttgcaaataaattggtcctactacaatttatccttcatagaaatgtggaaactgaagataaaaaaaattaggtttcagaagaaaactatactacacctgttattagattctagccctaaacattgtttttgaggtttttattatttacctgcaatttggtctaaattctgaattatttcctgactacaagtatccaaggaataaatgggttttctttttctttatgatagttttagttggcttctaatgcaacaacaatttttattgtaatcctgtgtgcattctattcctactattcaaattattaatgttatagatctttcattgtagtacttctgaattaaccaaaatcacagtattctgaagatgattctacaaagcctgctgtttctacaaaggctgctgatgatttctacaaagcctgctgtagtgttgctgtggcctctgcttaaaaaagtagaaaacacattgatgcagcatgttcaccccaacctccctgcctaaaggctcagggaccatcttggaagaggaaggcgcgtgagattgtaagagccgaattagggggatggagtgtggagaataaggacacttcatcttggatgctcacctgccaaattgacttctgatgaaagccagctccagaaatgtgcctacagttactactttcacctaaaccctgcccttagtcaaatccttctcttcttctaagcaatcaacttcaattccttgtataacccacagtataaaagggcttttataccattctatcctattgcatgtaagccttgggtctgggaggtaacagtgtgggattccaccatctcatctccctgccacccaaacatgcctgctcttctttaagcaatattaaatgtttgtacttcagaaatttgatttgtcagcctcttcttcagactctcagcttctttggcctttgggagtaaatttgcataggcctgctcaaaacaggatgttctgggggtttgggggtgttgttttgttttgttttttgttttgtttagagacagggtctcactctgtcacccaggttggagtgcagtggtgcaatcatggcacactgcagcctcaaactcctaggctcaagcaatccccccaccttggcctcccaaagttctgggattacaagcataagccaccatgcccagccctggacttttctttaaagacatttacacagtgtaggaattactgtgggtgcactgctcaggtccccttctccaggatgctcattcctacctcatagatgattttcctgcagagatttgacctcagctgaagggcagtcacctggtccaggtggttgctattcacctccttcctgagaacagccaacagccagggacacgctagcacagagatataagagcgaccaaggtgaggccccttctgtgctgcggtgcatgctccagagcctccctgggatcagacttaagagggtctccagccagatctggtcttcgctgctttcctcgagctccccagcgcactcctgcaatgcatcttttttttttttttttttttttttgagacggagtttcactcttgttgcccaggctggaatgcaatggcgcaatctcagctcaccacaacctctgcctcgcgggttcaagtgattctccttcctcagcctcccaagtacctgggattacaggcatgcaccaccacgcccagctaattttgtatttttagtagaaacgggtttctccatgttggtcaggctggtttcgaactcctgacctcagttgatcctcctgcctcagccttccaaagtgctgggattacaggtgtgagccactgtgcctggcccaatgcacctcttgaatcacctcctcatgctttgcttttagagaacatgatccccaacatgtgattccagcaaagattctagaaagccaaccgtgacaatcacttctgggtttagatgacccccccccaccacaagatggcagtgagcacctcatcacagaggtgctgatggtctgcagcaccgcgccaggccagaacgtgccttttacagaagaaaataacccagtagctgactaggatggtgaggagggctggtgagcactgcggtagtgagagggacactagcatcactgagatgcaagtgatggtcatttttcataggtcaaagctcaaagcaggggacagttacagggcagggcttcatagcaccagtgtgatgaaagtatctgggagtggctaaggccagcactatgccatgggaagcaaggtgggcctgaggaggaggcagcagcgtcagcctgcaacaagtgggggctgccctgcagagacctaagagtcatgttatagagcacagtgtctgtaaggccaagaagtgtggacagccaagtgtgtcaattactagacatactcaagaggagcaggaagggcagggcatggtggctcatgcctgtaatcccagctacttgggagactgaggaaggagaatcgcttgaacccgggaggtgaaaattgcaatgagccgagatttcgccactgcactccagcctgtgtgatgggagcgggactccatctcaaaacaaaaaaagaaaaaggaaaaagaaaaaaagaaaaacctaggtatacttctcaagcaaataaaaataatcaaaaccaatatcatgcccgggcacaaatttcatatatataacagatttaaatatatgagggtgattatcctctcatatctccatttttttttgtttttccatttttttctttactaaaaaaagttaatgccaatgacacacaatttttttttttttttttttttttgagatggagtctcacttcttcgccctggctggagtgcaatggcgtgatctcgactcactgcaaagtctgcctcctgggttcaagcaattctcctgcctcagcctcccaagtagctgggaccacaggagtgagccaccacacccagctaatttttgtatttttaatagagacggggtttcaccatattggccaggctggtctcaaactcctgatctcaaataatctgcccgcctcggcctcccaagattctgggattataggcgttgagccactgcgccccgcctatgtatgattttttttttaattttattttcataagtttttggggaacaggtggtattttgttacatgagtaatttctttagttgtgatttgtgagattttggttcacccatcaactgagaagtatacactgaacccaatttgtggtcttttatccctcacccccttcccaccctttcccccggagtccctgaagtccattgtatcattcttatgcctttgcatcttcatagcttagctcttgaacccttactttctgtttgagggagaagacatatcatctacaagtagatactgtgtaaacattccattgcatgactatcccataacttatttattatttgtgtttggttatttgctgctatgtaacaaccccactcccaactaaatggtgtgacaattccatgattctgtggatcaaaaattctgaaaagtcaaacccaaggagttttgtctctgctccatgatgctaaagcctccgcaggggtgaggcgaatggctcagggtgactgaaaagctcagggttggaacagctggggatgaggcctctatgtataagatgattcttcactcacaggtctgaaactatggtggggacagccagaaggctcggctcagctgggacagtcacctgagccctacacatgacctctccaacatggtgatcctgaagcagttgggtttcttacacagcatcacacttttcttttttttttttttttttgagatgaaatattgctctatcacccaggctggagtgcagtggcacgatctcagctcactgcagcctccgcctaccaggttcaagcgattctcctgctccagcctcccaagttgctgggattgcaggcgcctgccaccaagcccagctaatttttgtatttttagtagagacggggtttcaccttgttggccaggctagtcttgacctcttgacctcaggcgatccgcctgcctcggcctcccaaagtgctgggattacaggcatgagccaccgcgcccggccaaagctcacacttcttatgattcagccttagatgtcacatcagttcattttccccacacttattagtgttagaagtcacaagcccacccatactcaggggactggcacacagaccccactctcaatggaaggggtgggacaccaccattcctgctgatgggcatttgggtaacttcctgtttgaagctattaagattgggctgctgtggccgggcgcagtggctcacgcctctaatcccagcactttgggaggccgaggcgggcggatcacgaagtcaggagatcgagaccatcctggctaacacggtgaaaccccgtctttactaaaaataccaaaaaaaaaaaaaattagctgggcatggtagcgggcgcctgtagtcccagctactcgggaggctgaggcaggagaacggcgtgaacccgggaggcggagcttgcagtgagccgagattgtgccactgcactccagcctaggcgacagagcaagactccgtctccaaaaaaaaaaaaaaagattgggctgctgtgactattctagtaggtgtctttggtgagcgcctacacgtgtttctctttttctctttagtatatgcccaggaggggaactgctggctcccagataccgtatgttcagggtcacacacacttccacagggttttccaaagcccttgtaccagcacgcactcccagcacctgtgtgactgctccagctgtcccacagtctcatcagttctattgctgatattttcattttagcttaagttatatttaataggaaaattaccgttgcctctgccccccgttcctgcctgtaggagtttctcgtagctgttgctacaggtggccacaaatctgtcacttaaacccacacaaattgatgtccttatggctttggagtcagaagtgtcaactgaaggtactagcagggctgtactgacctggtggcctcagggagcatctgtgctgcttctccaccttctagaggctgctgcatccctcgctccagccccttcctgacaccactcaccctcctacttctgttatcacatcctcaccttctctgtgttcagggctccctctgtctctctcttgcaagcacacttgggattccattgagggccacccacataacccaggagaatttctccacctcaatatccttaacaactgcagagcccttttgccataaaagttaccattcacgggttccagggattgtgacatgggtagctttaggagtgattattcctgcctgtctcccgctcaccagaacttggactttctctctcaacaggagccccctgtgtgggaatagcctgtctcaacgacgccctctataaggacctgcttcctcaaaggacctcatagtcgggtcctgcccctcagtgtccagtctgccttggctggaggggctgcaggggtgtgttggcgccacctggtggagacagggcatcacagcaggtgggagcccagtagaagcacaaccaaaacatgggtaatgtttaaaattttctggctaagcgctgtggctcacgcctgtaattccagcactttgggaggccgaggtgggtggatcacatgaggacgggagtttgagaccagcctggccaacatggtgaaacatcccctctactaaaaaatacagaaaaattagctggacatgtggcgcgctcctgtaatcccagctactcgagaggctgagacacgagaatcgcttcaaccccggaggggttgccgagatcgcgccactgcactccaggctgggcgatagagcgagactctgtctcaaaaaaaaaaaaagaagaggggaggcgaggggaggggaggggaaaagggggaatttgtttggagctgagacatccatcttctcctgacctcagatatttgcactcctggttatgaagccttcacacttggactgaatacaccaccagctttcccgatttccagcgtgcaaatggcagatcgtgagacttctcagcttccataattacatgagccaatttatatatataaattgggtcctccagaaaaacagaataaattatatatataattatacgcataacttaattaaattatacgtataacttagctatatatataatttattctgtttttctgaagaaccctactgacacaaatgttgagcatcttttcatgtgcttattggcttaataacttgtacatcttctttggggaaatgtctattcaagttctttgcccattttgtaactgaactattaatatttgtctttacattgttgagttgtaaaagttccttatatattctagatactagagccttatcagatatatttctgcaactattttctcctaatatataggttgtgtttttattttctttttctttttttttttattgagacagtctcactctgtcacccaggctggagtgcagtggcatgatcttggctcactgcagactcgacctgccaggctcaagcaattctcccacttcagcctcctgagtagctgaggttataggcacttgccatcgcacccagctaatttttgtattttttagtagagccgaggtttcgccatgttgcctaggttggtcttgaactccctgcctcaaagcgatctgtcagcctcagtctccctaagtgctggaagtacaggtgtgagccacagtgcccggccatctattttcaatagtgttttttgatgtacacaggtttggaattttgataatgttcaattcatccatttttttttttttttttttggttctttctactggaccaccactcttgagccctctaatccaacctccacgcggcagccagagggagctctctaaatgtaattactctttccctgctccacctgctcaaaacagtgtcacatttgtgatttaaaacagtatttctcaaacctaatttgcaaacaaagcaggtggaactcttcttgtatgcacagcatctgatttggttggtctggcatgggtctgggagtgagcacacctaccaagcggctgctggggtaacttgcgttttccactgatgatttcagcaatgtttccggtcccacatgctcctccagaaccttgtactcccccatgaaaaggtggagtccatttccccttcctttatttatttttttgagacgaagtttcactcttgttgcccaggctggagcgcaatggcgtgatctcagctcaccgcaacctccgcctcctgggttcaagcaatgcttctacctcagcctcccgagtagctgggattacaggtatgtgccaccacgcccagctaattttgtatttttagtagagacggggtttctccatgtcggccaggctggtctcaaactcccgacctcaggtgatccgcccgcctcagcctcccaaagtgctgggattacaggcgggagccaccgcgcccggctatttccccttcctttgaacctgatcaggacttgacgatggcatcaacatggtgagagtgaccctgcatggcttatgaggctgggttacacaaggcgatgttgcttctgactggctccctctcaggatacatgcccttggaacccatcctctaagctccttgggagcccaacttagcccatgtggagacaagacagggagagaaacagaggcacccccagccctcagccagcatcaaccgccagacaggagagcaaatgcgccaacaatgattccagctgaagcctcagacagcgtggagcagagatgagggatccctgcagattgcagatgcgtgagcaaaatgcatgctgtcactgttttgaaacaacaatgtctgggggctgtttgttatgcagcaatagacagctgtaacaatgctgttactgctgtattccatgaatgactgcactttgagtagcagggggctagatcactagataagccccatggcttctgtgtatgctatttttctacttttatatccttttcattcactttttttttttttttttttgagacagagtctcactctgttgcccaggtgggagtgcagtggtgcaatcttggcggactgcaacctccacttcccgggttcaagcaattattgtgcctcagcctcctgagtagctgcgactatagatgcacccccatgcctggctagtttccgtatttttagtagagacggggttttgccatgttggccaggctgatctcagactcctgacctcaggtgatccacccaccttggcctcccaaagtgctgggattacaggcgtgaaccactgcacccagcctcattcactttctttacttggctcatttttccttgttgcctcaattctcctctaagatcactttcctgacatttcagcctgggcctgttgccttctctgggtcccctccgcctcctgtgcctcccccatctcagccttgatccctcagattatacttcctctgtccccaccctgaccatcttggctgtccctggatagggatgggtatcttctcccactggtctgggagatctggaaggacaggcctggaaaagacttggtcactgctggaaggagctcagttagtgtggtgctgaggacagtacgggtgaggctggccccttcacccaaactcccactctcttccatagatttcacctctgtggcccaggccataggattagggcaactccccttaaacatcgagtccatcctccaagctgtccttttttttttttttttttttttttttgagacagagtctcgctctgttgcccaggctggagtgcagtggcgcgatctcggctcactgcaagctccacctccagggttcactccattctcctgcctcagcctcccgagtagctgggactacaggagcctgccaccacacccggctaattttttgtatttttagttgagacggggtttcaccgtgttagtcaggatggtctcgatctcctgacctcgtgatccgcccgcctcggcctcccaaagtgctgggattacaggcgtgagccatcgcgcccggcctcatgctgttcttgaatagtgagcacctgttacaagtcgccccaccagcctctcacttgtacccccctcatctctttctccccaagagacagaggaccctggcacttgtgaagcatgacccagaccctggggccatggcatccaacatcctcattccccatgacccctactgtctagatgtagctgccaagagacccccagactccccgggcctctgtctagagtgccaagacagagagagaatgccctgccgcttgcatgctttgtggggtgtccttcccccttccctggctgctaggcgtgacttcaacgttctccccaacccccaaacagcagcactgacaccagctgcagacctggctcaggttagctaatgaggaccaggctggggatggagcctgaacccctaaaccccagtcctgtaccccaccctaatcctggggtctccactggacaaaacgaagcagcttggtttttcgttgttattgtttttgagatagagtatctctctgtctcccaggttggagtgcagtggcgtgatctcagctcactgcagcctccgcctcccgggttcaagtgattcttgtgccgcagcctccccagtagctgggattacaggcgcgtgccaccacacccagctaatttttgtatttttagtagagacagggtttcaccatgttggccaggctggtctgaaactcctgacctcaagtgatttcccagcctcggcctcccaaagtggaagcggcttatttttaaggagaaaactcccgtggaaaggaatcagcacctcctctgtcaacatttcacttctctgaaaagactctcacttccaacagaaagtgctttgtaacacaacaatgaggctgggcgaggtggctcatgcctgtaatcccagcactttgggaagctgaggcgagtggatcacgaggtcagaagttcgagaccagcctgaccaatatggtgaaaccccgtctctactaaaaatacaaaaattagttccgtgtggtggcgtgagcctgtaatcccagctactcaggaggctgaggcaggagaatggcttgaacccaggagatggaggttgcaatgagccgagatcacgccactgcactccagcctgggcaacagagtgagactccgtctcaaaaaaaaaaaaaaaagaatgagaacatatggacacagggaggggaacaatacacacaaacaaaatttagaaacaggtgaaaataattttagtaatatttttactaatactgatatgctcaaaatattattatttcaataagtaatctaaaaattattgagatgtcttatgttcttttcatcatactaagcctttaatatttggtgtgtattttacactcacagcacatctcaatttgcagtccccatgtttcaagcactaaataaccatgtgtgtccggtggctaccatactggacagcgttgatctgaaatcgcatctgtatgcatcaccagcatatttgcagagatccccatctcagcagcacacctgaggctcatctgcgaaagcacctgcaacttctctacaacctcccacatcacctccaaacacatcctcatgtcatctgcaaacacacccatagctcacaggccaatgcctaaatatcattgcaggcaccttcagagaaagcacttactaaaggggtatacttgattccacatctgctttgacctgcaaatctcccttctcctttacatacatttgcatctcatttgtatgtcaatctaaatccactggcagagcctcagatcatcatctcaaagtcaggtggatgtggggctgggcaggcctccaggtgttcctcctcctgcttcctctggggctcttgatcctcctcctcttccttgctgctctcctcctcctcctccaatatggtgaccagttcctcccgcagcgcccccatctccagccccaggctgcacagctgtcccagcagctggacatccactcggcgcaggttcccctgccagtaggaaggggacgtcacagggatgccaccccagagagcaaggggtctctccaggacctgggtgagagcaggtcccaactcatgtcctggccacagcgcctgggcagggtcctcactgtgcccatggaccctaactgccttcctgcttctcagagtgtctcttgatctctaactcttctctttgtctctccatttcattgtccctgacttctctctctctgtctcctccctctcttatctatatctgtccctgtttccctttgtctctgtccccatttattttttgtctttccatgcccctgtctctctgtctttatgtgttgccatttctctgcccctgcctttggctctctttctctcgcttgccctctctctgccctccccaactttctcaaattcagtctgtctctccatctctgttcctgctctccgtctctgcttcccacctctgtccctctcttttgggatctccctgtccccacctctgttcccgtccctcactctatgtctgtctctcggtgtctgtacatgcctctcatgtctctgcttctatctctcagattctgtttttcgatctctggccttctctatttttgttcatttccattcattctcatttcctctctttctctttcccttccaaacccctcactcaccagctcctccctgatccacagcagactatcgcaggcacctccagtgtctgcccctgcagtcctgagggtctgaccagggatttccactggggagacctccctcagggcctgggggggtgggcccagccccggaggcaccagtccagcctgattcagctgcctccacagttccatcgtctctgagctatggctgcaaggagcaggaagtagcaaggtccagggtggcctggtcccctggggagctgtgtgcgtggtggagagtaaagggcagagggagtgggatgggggttcctgggaaaggtatcccaaagtccactcttcagagagaatcagctggccttgtgcttttctttttccttctgaagtctaacctcaactctgctcacagggttcaaacatagcctcttgcagaggtctaactccacccttccctgcctgtctcaggcctgacccctcaggggcgctcagtgtctgtagatgcctggcaccctctgtccttccacctgccccccaccaccacttctccagcctctcctcagcctccatttgacctctggcttgcccatagcttggtccttgcttgtcctcttggcacgggtcatcctagggctttcccaccagtgtgcctttgggggcaggaatggctcccaggggcaccaagacagcaatcccttagctggagtgcctgtgtccaggctgctggcctagggccaagcagccaattctgctgaccctggacttgcctatgggtatattatccctgttgagggtgagggcttctgctgtggaaaagtctgggaagcactgcaggcctctctcggccttggacccttccttcagacccaaggtgcatatatatacatatatataatggtagatcacgaggtcaggagatcaagaccatcctggccacatggtgaaaccccgtctctagtaaaacacaaaaaattagccgggcatgctgccgcgtgcctgtagtcccagctactcgggaggctgaggcaggagaatggtgtgaacccaggaggtggaggttgcagtaagccaagatcacgccactgcattccagcctggcgacagagcaagactccatcttaaaataaacaaatgaacaatatatatatatatgtattttgttttttgagacagagtctcgctctgtcatccaggctggactgcagtggtgcaatcttggctcactgcaacctccgcctcccgggttcaagcgattcccctgcctcagcctcctgaacagctggggttacaggtgcacgccaccacacctggcgaatttttgtatgtttagtggagacggggtttcaccatgttagccaggctggtctcaaacccctgacctcaggtgatctgcccacctcggcctcccaaagtgctgggattacaggcgtgagccaacgcgcccagccccaagtcccttttaccatagaaagtaacatagtcacagtgcccagggattcacaggtatggggagagggttcgttattcagctgccacacccaccttcctaaacctgctgcccttccagtttcctcacgtgcacagccacgcccgtctgcttttagtttctcaatctgttggcttaaccttcaaaacaggcccaggatttgagcacttctcaccattccctctgccccatccccattcatctcttgcctagactgctacagcagcctcttttactggtcccctgcatccacccttgccctctaaggcaagggtccccagtccctgggccaaggaccagtaccagcccctcgcctgctaggaactgggccgcacagcaagagatgagcagcgggtaagtgagcattaccgcctgagctccgcctcctgtcacatcagcagtggcattagattctcataggaggcaaaccctattgtgaactgtgcgtgcgggggatctaggttgcctgctccttatgagaatctaatgcctgatgatctcaggtggaacagtttcatcccaaaaccatccccaccccacccccgacccccagtctatggaaaaattgtcctccacgaaaccagtccctggtaacaaaacggttagggaccgctgctctaaggtacattctccacctggcagaaataatctttacaaaatgtaaatccgattttgacactcccttcttcccactgtgaatagaataaaaccctaccaggcctgcaccgtcagcccctgcccacctctcaacccagtctcctatctctgtctgcaagctggttcccacctcaaggcctctctgctctagaggctacctctccctgcagcgcttttcccctagatctttgaatggctctttccttatcattcacttctacttcaatgtcacctcttcagagaggcctttgctgatggccctacacccagtcacttttttttatctgcttctcatcaaaattgccttgctgattcctttgtttcttattcatcctctcccacatccatcctctcccagcccagaatgttgacttcctgagagagggactgggtctgtcctgctcaccatggtaacctcggcatctagaacagtgcctgccatcacgtggtaggtgctcagtaaatattcttggaactaatgaatgaataattctatccacaagacttcacaatggctcttcatgctgcgatctagctttcaactccaaactggtcttgagatctcacctcagtctctaaccttgacatctaacctcttcacccactctcttacctgaccctaatttttaaaaatgacgtggtcagcttttcagccccctcattccctgtttttaggaggtagtgagtggaagctggaagaataagaaagcttggggagactgcaattgcagtcaggaaagaaaggtactctgccgggaagaacaccccatcttctcctagggaaagattgtggagtcctggggtttgttttgtttttcaattttttgttttaagagacagcgtctcgctctgtcacccaggctggagtgcagtggcgcaatcacagctcactgcaacttcgacctccccggctcaagtgatccccccgcctcagcctcgtgagtagctgggaccacaggcgtgcaccaccacgcccggctaacattttattttttgtggatataaggttgccctatttctttgtggagataaaggctcccctatgttgcccaggctggtctcgaactcctggcttcaagcgatgctttcgcctcggcctccacaaagtgctgggttcacaggtgcgtgagcccgacctgtgtctcgttttgaagctcagggagagggcgctgtgagcaatccctaaaccctttaagagtaaaaagtgcgtgcacctttaagaggacggttagaaaacgcggggcgtggccacaggagaataagttcgcgctgaaccaggagcgtgggataagaccggccccttccggttacgaaaccttagcaagatggcggctccctgggcgtccctgcgcctggtcgcccccatgtggaatgggcgtatcaggggcatccatcgcctgggtgcggcagtggccccagagggcaatcagaagaagaaaaggacaatactccagttcctgaccaactatttctacgatgtggaggctctgagggattacttgctccaaagggagatgtacaaggtgcatgagaaaaatcggtttcgagacaaggagtggatcaggccagataagtatggccatttctctcaggagttctggaatttctgtgaagtgcctgtcgaagctgtggatgccggtgactgtgacatcaactacgagggcctggataacctcctccgcctgaaggagctccagtccttgtcgctgcagcgctgctgccacgtggacgactggtgtctcagccgcctctacccactggccgactcgttgcaggagctctcgctggccggttgcccccgcatctccgaacggggcctcgcctgcctccaccacctccagaacctccgcaggctggacatctcggacctccctgccgtgtccaaccctggcctcactcagatattggtggaggagatgctgcccaattgcgaggttgtgggagtcgactgggctgagggcctgaagtcagggccggaggagcagcctcgggacacagccagccctgtccctgcctagcctttagccctgtccccactcacgtggcttctcagcgggctgcatggaatgtctggtagctcaccacacttctggcttccatttgtcttcactcaacgtcagggtgggggagtggtgctggccaatcacaggagagagcgtgagttcccagtatttattcctggctgcccttggctaaaggtcacagctcctgtcaccctgtcaggcagccctttccatgcccctgttcaggcctggggaggtaaaggctcaggctgttagtagccgcagagagccacactcaccttgtcaggagactcttctcaaactgtccttatgtgagtgcactgccatttcttgcagggaccctgactgacacaggggctactactgacactttacagggatggttctcccccgtgcagggccgctgtgcccactgcaggacatgcagcatccttcgccccactccactcactaaaggccagcgcaccccaggccccatagtattgctggttatggatttattgactttatgttccaaattcagctttttcagttggctgttttttgaaaggggataagctttgtcagtagagggcaccgaacaggcattataggaggaaaggcgcctccttcgtggttcttgttggttgtgcttctgcctctggacgccgcagtgcatgtggcttccccagcacccagctcctgaagcaccaggcggtcagcagctgcccttggcaccctccagccctcagaagttgcgtaggagacacagcgcctccactgaggcacctctctgggaataacgttccccagcaccccaaatggatttccagtcaattcagaagcattttaccagtgaagccctcattattccagttcactgttaaagccagtaattctctatattaaactttccctgttcggtttatactccggagtataaaccgaacaggcctgccatagaaaatgcaaccacagaaataaaatggattgctttttttccctgtagtgaaaatacatttaaatctatctca

SEQ ID NO: 735322 - DNA, 188448 bp, Homo sapiens
ctccaaggctgagggatgaggagacctgctgaggacccagggccttatctttccatcccactccataggtcccagtattgactgatgctgtcttcacctcctagcctcacttttaaccttctggcacccgcccaccactgtccagttcactattgaagccctgccgtccagtgctgcagagggaaaggatgttcttctactggcctgcaatatttcagaaactattcaagcctattattggcacaaggggaaaacggcagaagggagccctctcattgctggttatataacagacattcaagcaaatatcccaggggccgcatacagtggtcgagagacagtataccccaatggatccctgctgttccaaaacatcaccctggaggacgcaggatcctacaccctacgaaccataaatgccagttacgactctgaccaagcaactggccagctccacgtacaccgtgagtgattcccccatacctctgggtgctggcggtcagttctgcttcacacacatgagattgtcaggcctgggctgtgcctgcatccccctctgcattttgtcccgtgttgagatttgggcatttagtgcaggacacacacatggtaggtaaacttcaacagatcagaattcctttcctgcatccaggccctgcagacactgatggcgggggcgggggggcctcagcagggggaggtcagtctcagccaagcaccccatgccctccccatgaacctgaccctgagaaagaccctggagaactgggtcagggcctggcctgagggcgtcctgggaacctcacaaaagcccagcctcaggactcctgactccgtgtgaccccgggaagcctgtgtcagggctggggtgtggtctcctgggcagggcttactgggagcaaggatttaccagatgtctgcgggctgtggttcctgaagcttctcatcagtgagggctcagctcccagagtctcatctagacaaggacagagcctaccactttccctgggactcagcctggagagggcagggggacaggattactagggcattggccccctgaatgaggagcttaagagatgcccttgggcagtcagtggcccaggggtaggaacagaggggagaaaatgttcctggcagcttcttgtccaccggggatcatgcccaggggtgctctcccatggaggcaaataacagatgctgttgatgtgaacacctcctctgtgccaagcttcatgtcagatcctgtgaataatttaaagttcattcacagacaaagtggcaagcctcagaccattttccatttacatattgtatggaggggaaactgaggcacagagagatacagacaccggccacggtgggcagatcgcagctggcagagtcacatgagggctgtctgcagctgctgccacgtcctctccttcatccctggtgccttactaggtgtctgtggaccttagaacagccactggttcggatgttttcttcttaggtgtctacagctcggagggggagattctggtctggagagttatgagtaaatacagaattaatcagttttttcttaactaaatcacctgcctcaacaatcagtcagtgctggggaagttcaggcctcctcgctcaggtccacaccccgcatctctggacatgaaatggcttcgtgtgttttctgatgtgtgggtatcattccaacaggaggataaaggggaggactttgctttctctccccattcacaccctgcaccagccagggcccagtgtgagacacatactccgtagttctctcatgaaggagggagggaatgaatgaaggaatgatctataacctcttcagagacagagacctggatacaagatcctaggaggttctgggcccaacgtgagacacacactctgtagttctcttatgaaggagggagggattgaatgtaggaatgatctataacctcttcagagacagagatgtggatacaagatcctaggaggttctggccacacctgttttctgtccctctagagcctaagacccatgtctcattcatctggcccgtttctcctaaatctgcccctgggagctgagtctcatctgaccctggggctgcagggctgtgggaaggttttcaggggagggatcaggcttgcgggtagtcccacacgtttgccttacaccctggagctctacctggttctcactatgaatatcccataataatcccccctatcctttctggggagtagaaaaaaagtaaatatttaaaaatatgccagagcatctgttcttcttagcaagttcagatagttattagttagcaggaataaatcgttattttaccagagcctcacctgctgggggtttatgggagcctaactgactgaggggggtgggaaatatccaactccagccccctctagccatcatgtcccacctaaaggagagaaaaaactgagaggcacttgtgacattcacagcccagggcacagactctatccaggaccacagaacccctccctccccccactcaccaccgcatcactgaacgcctgctcacccaagttcctgttgcccagtacatcatgtcctggctttcaacaaaaactacaagacagactagaggcaaaaaaaaaaaaaaaaaaaatgcagttcgaaagacagaacaagcatcagaaccagatgcagatgtggcagggatgtggcagggatgttgaaattatcagaccaggaatttaaaacaactctggggccaggagcggtggctcatgcctgtaatcccagcatttgggaggccgaggcaggcagatcacctgaggtcaggagttcgataccagcctggccaacatggcaaaaccccgtctctactaaaaatacaaaaaattaggcaggcatggtggtgggtgcctgtaatcctagatactcggaaggctgaggcaggagaattgcttgaacctgtgaagcggaggttgcggtgagcctagattgtgccactgcactccagcctgggcaacagagcgagattccatctctaaaacaaacaaacaaaaaacaatactggctaatatgctaaaggctgcaatggaaagcatagacaatgtgcagaacagacggatgctgtgagcagagagatggacaggctaagaaagaataacaacagctactatatctatctatctatctatctatctatctatctatctatctatctatctatatatatgtatatatatgctagagatcaaactcactgtaacacctggatctcagagtggttgtgaggatgtttattaggagattaaagagattaaagcagagttatacacagggcgagagctcaactgatgctatcaactagtattcttatttttttgatgttgttattggcaataaaatcaggaacaatgcagtaaaaatttggttttatcatgtacgagttctgtgaccttccttgacttactgaggtactgtaagtctcagattctaactctgcagatggcggtgatgcccctctccctcaaggtgatgtgaggatgagatgagctgtaggtaggttggtgcccactgtgcctggcacatggaaggcccctgaaaatagtcaatgaacatcatccccgctcatcagcatggagttgacagtgagggctcgctctctgtgacaatcatggaatggaaaagaagaaacaagaggaagactgggcgcagtggctcatgcctgtaatcccagcactttgggaggccgaggcgggcagatcatctgaggtcaggagttcaagaccagcctggacaacatggcgaaatttcatctctactaaaaatataaaaattagcctggcatggtggcacaaacctgtaatcccagctacttgggaggctgaggcaagagaatcgcttgaacttgggagatggaggttgcagtgagccgagattgcgtcagtgcactccagtctgggtgacagagcaagactccatccaaaaaaaaaagaaaaagaaaaaagcaacagagggaagaggtgtgacatgagaggaagaagggatttaaaggtacaggagcagggcgaggtgcaagcacctgtgggagaatgtaggagttggtacatcccagtgtgtcaagtctgagacacagaaaatggtgcaaccgtggagagcaagggagtcagctatgaggacagcccaacagaccacactcaggctctggagcatttccttcctccctgactatgcccctgccctgcaatgccccttatggtttcccttggaacaaacttgggccttgtcccctttgccttcccctttctgcagaaaacaacgtcccaggccttcctgtgggggccgtcgctggcatcgtgactggggtcctggttggggtggctctggtggccgccctggtgtgttttctgcttctctccaggactggaaggtaccgcagcttttccccagcctcctcccacccctaggctgaccccagtcagggaggagggagaccccgccctgtattcagggccaggctttccgcatcctcccaaggaatccttccctctcattccatggctcctcccttgccagctgctgatcctaggctgcctcttcctttatgaatgtggcacagttaaggttgcacccctgagtgctgtcctagttccctaacacagcaaagccacagctgcctggagggaggaagggagggagggagggagggagataagacgggagtgctcagaacctggtaccttctgctgttcattgaatttacccacccagtgaggagggatttgcaggcttgagatccatggtgggggtcctgggcatggtcacgcagtggggagtggcaaagcctggacaggctgggtagggtcagcaccccatcgtgattgatgtccctgaggtgtgagatgggagaacctggacctcaggacctgctgtcctttatgtctcttgccaaggggtggagagagagaggacaaggccattgccccatttcagcatctccaggcctgaaaggagggtctggccatggcagggatactgagttctgggagaatatgatacatgctccttgcctccccatgcccccagctcccccagtgtcctgcacacacagccggccctgctttccctctggggccttgacccttcctctcaggcaaacgcaggtggtctgattccctccctgagtcctcagtccctttcctgggtccctgggtcaatgttctcctcacccggcatctgcctgggggggtccttcctctctggccaggacagacgtgactgcttaaggcctatcctcagctccccgtcctcggccgctcctaccacgaaactgatggagacaggaggccttcactccagtccttgaaaatggagtcccttccttgtcctttattctgcccctaaacctgtgatttctccctgcaccctcatgaataatcctgacctttcctagggccagcatccagcgtgacctcagggagcagccgcccccagcctccacccctggtgagtgtcccttcagcccaggtgtgggagcccctaggcctgccctacggtgtccactcctgccagtcaccccctgggggcctctgaccctttctttggggctgcaaggaggatgtcaggaaacatgacacaggggaccccgactgtcttgttcagactgatctgtgggctctgggtcgtgggtcacctcctcgacctcagctgctcaggtctcccctgggaagaggctccctctccctgattctctgggagctgaggacccctacactctcctgcaggaggggcccaggctctcctcccaccctgctgctcactcctgtctctgtccccaggccatggtccctctcacagatccaccttctcggtaagcctgttccctccccagcccttttctactggggtcccaacagtgcaggctcagggcagggggaccatcaaccccacagcacagcactgacccacctttccccagaacagtcaggtcaaagtgagtgcctccagccaggatccgggcctctctacagggccaggaccacccacgccatgtgctgacccctccccgggaccctctacacctgaggagaaccctggagtccagcaggtgcagaatggacactgggaccatcagtcagaggcccacattaacaagggtgcggggtgggcccagccaggacaggggtcagggtgttgtgtccacactgggaggctgagctcaggggcagagctggtcaatcctgaggggaaatgagtggaagtggaggcagggaagtaagtcctggccgatcagagacaggaaccttccaggctgggcttccgtgaccctccctccctgtcccctgacatctcctctctcccctgcccaggcccctctacccagccccagaacagccactcccatctatgaggtgagtgtgggccatggatgttctggtcccgcaggctccaggggacccaggatctgcccccaccagcacctggctgagctcagattcaggaaaatgcagtgaaaatgagaacaggtggtggtgagcagaggagggaggggcctgggaacagggaccccctgagcacagccaggttcagccccagagaagccctgggtgggcccagagcctgggagatgccagacactgttctgagaaggctacaggggttgaggcctcttctctgtttttacaggaattgctatactctgatgcaaacatttactgccagatcgaccacaaagcagatgtggtctcttaggttcctctgggagctgctcttgtgggttgatggagcgtccccaaagctcccagccctggggacggggaaggacatggagcctgagccagagaaccagctctgagtcctgaggagacacaggcctggggacagggagggatgggagtccctgctgaatatctggagaccctgacaggttgccctgggctctgggtgggccgggacaaaggcctctcatcaccacaggaagcgggggcttgcaaggaaagtgaatgggcctgtggcccacccggggtcaccaggaaaggatctgaataaagaggacccttcctctcattggctctttttctgctcacgggaacttagcagaaactcacctgaaactccgtgtccattctctcccgggtcacacagggaaaatatctccaccttgtctcaaccacagtctctcttccctgggaggcagaaataggggttgggagtcaggctggggtgggccctacacaggaaagggcaagattcacatgagccctgcccagccagccgagcgctcagctgtcctcacactaccccagggaccaaggccatgcacagccccagcctgggtccctctgtgaatgcatgtggggtctcaggagcacagaagatggggccatctgatgtccacaaaaggtgagcaatgcgggagcaaccatgggtggtataggttgcggctgtggcccctacgcagcctccagtgtcctgacccctgctgccctcttcacccaggccctggaggcccagtctatcactgtcctccacaaatgaacttacctgtccccaaatccaggatcctgtgtgcttatacctggccactaggttctcctctgtcccagtggctactgctcaggacatctttatccctggtggggcacagagaggggctgtcagagcaaccaagattaatacagacgcataattcagtccttgagcactacccaggactctggcccctcattgctcatcagttcccactttaccccctggcatggatctcactgagcaagccaactctttacacaggagcatccaggtcagaggtgcaggactcccccatctaaagctcatgcaggctcccatggcgatgggacaacctgtctgctcctctccctggcccacagccctatctcgcctgcagctcctccacacacctgggacagcagttctcagcccttccctgagggcccctggaagggtgatgatctcatataggttcacttgaaccaggtgccaccttcccacaagtgagctggtgcctgcactaaagcacagagccacagttcccaagagtgttctgccactgccacaggtcccaagagtgttctgccactgccacaggttgttcgtcctgagatgagaggtaagaaaacaacccgcaatgggttgttttatatcgggatttgcatcaggatttagctctaaatgacccctgatcccacctgcacacagcgtcagatgagacaaggtgaggcctctttagttttctgttgaggctgtgacaaattaccacaagcttagtgacatagaaacctgaaccaaagtgcccacatggctgtgttctttctagaggctccagggaagagtgcatttcctctccttttccacctcctagaggcctcctgcaaccttggctgtgtcctctttctccatcttcaaagccagcagcacagcatcttgaaactattctgtgccctgcttccatccccacatctccacctcctcccacctccctctctcacttaaaaggaaggagccttgtggttattttggacgcacctgggataaaccacaacaacctccccatctcatgatccttcctttaatctgtaaagtgtcctttaccacgtgacatgtccacagatctggggatgaggatgtacacatctttgagaggcccttgttctgtccatcactcctctcaaggccatcttctcatcatcgttcactacaaactacacatgggcacctggatgggttcatcatgactgtggcgtcagttcctgcattaacatccccagcaccctccagatcctgagagagggagacggagggctctccatgcccctagtacctctccaccttcttcttggtgacatgcttagttgctaagaataacagaaagcggaggtgactgaaagatcacaactcaccggcccttcaatagttcgtggacatcagcaccacggacagtgactcagtgaggctaatttccaggtggcagcagggagcatgcagataggagggaactgcaggaaaagctgcccattctattctatatgagaaagagtgtaagaaagaggaagctattacagggataatgctattcttctctaatccataaattgcgaaacctttgcatgtctggatatcatggtttttagcacatctgctgccactccctgcagggctgattgctgcatccaggatgtggtctcttggggggctcacagcctgctttggcctcatggtgagtctccctgcccctgacactcaggccactgtctctgcctacaacatggtgggaaccttccatgattaacgtctgattctctgtgcctgacctttgaagcacatccatcactcagcctggagcatccgctgagctcagcatcctgctcctccatccccagctgagcccttgaggagatgcttgagaggatctcctgggctcctctgtgagctcctccaggctgagccttgtgcttggtgtcagaggcctttgccatctgcttgttctttccataggcaaataatcctcctcagggacaagtggggcctgaagatctgtctgaatatctatctatctatctatctatctatctatctatctatctatctatcatctatctatatgtatgtatatatgagaatgctttattaggcaaaactgcatactatgaacatgctttaaaatgcaacaggatgagatgtgaagacataaagaacaagtgtgtagtgacacatggctatcagaacacactgaagaatccacaccgcggccgagagcagtggctcacgcctgtagtcccagcacttttggaggctgaggcaggcagatcacttgaggacaggtgttcgagaccagcctgaccaacatggtgaaaccccatctctactaaaaatacaaaaaatttagccgggcctggtggctcatgcctgtagtcctggctgttcgggaggctgaggcaggagaattgcctgaacctgggagacacaagttgcagtgagctgagatcgcaccactgcactccagcctgggagatagagtgaggctccatctaaaaacaaaacaaaacaaaaagaatccacactgcttccccgcttcactttacccagaaaaggaatgttctaggccacttcctcttcagcacacatccccagggaactaaaataggttcacagtcacccccatcttcctcattcccatcacctcttacccacagaggcatctctggtcctacagatccagccctgccttcaagaggcacaggtccaacccatccagtgtccctgctagtcacacacagcactcagggtacaatggagggcttctgtgctttggatgggaacaaaccccacctcacattcccacacctgagaagccaccagggtcctctctgtcctgtcctcacactcaatgtctgtcctgggtcacccttgtcatctctcctggaaataggcatggctcctgacaggtaggattgaggctttgtcttttcaggagtccctcccactctgagcacatgaaactgctcagctccatgcaaccctctctcaccaggggccttgttctctgggtccctgaatacctgggtccatgccatgtacattttaagaaaaatgacagtgactctcaccctgacatcctcacccaaggcacgtgtctgacaagaatcaccaggtgagatacctgtggctccacacacctgaggcttcactgcgcaggggtgtcctcatccctctcctcccacccctagggacagtaagcaccacaggctgccttggaccaccagctccccctcccagacacagcctcagatctatactgacatgctacatggagaggctctgatgaacagcaggtattaggaaatcccaccgaaccaggtgccacttgcggccccactcctcctcatatctgtgactgggacagacacacataacacacctctgttcaccgcccagcccccaaggtcaatcacagtctgcttctcccctagatccactgctccccatgtcttccgtcctcagctgcatcctgggtggcctccttgctgttcttgtaccccagaggcaggttccaacctttgtgatgttgcctgcaatgcccaaactttcccttccccttccccttcccttttcccctcccccttcccctccccttcccctccccacccctatcccttcgtcttcccttgtcttcccttcccttccctataaagccaaacatacccatccacctaccttgtggtcaaagtcatcagcctcctgctccactcagtgttctctgaccctgcatatggaggtggtggcccctcctagaacacccaccactcactgtcagccttgcgtggtaatcacagattttgcaggggttacctgtgttcaggtgtgtcacctgtggaaccagaactcttggaaggactggcagagggagctgcttaggatatctcagggctcctggcatctggtctaccacagggctattaacaacagcacttagggacaaggtggaggatggacggttaagagggtaaatatggatgatgtgtgggcaaagaataggacacaggaacacatgcagtactcaaataattatgccaagaaaggtgaggacatggagatggacattcccatatacttctgatgggactgcagtttagtccctacagcaacattgacctcatcatgtttaacgcgcacacgctctgaccactatcctacttctgaaggcctccctgtgctgtgagctctgagaaggccaagcttgcctgttctgtctctgctaaagccagagaccagccaatagcccagcacagggtacttcataaatacatgttgaaggaatgagctccaggaacagtactccacatggtagagatgtgtgtatgaggatgttcactgcagaaggtcatgtcaatgtgacaagtgacgagcagcctcaaatccagcaacaggggtgtgggtaaaagatcatagtgtagccatgcaatggaaccaatgaaaaaaccacaattagagcaaatccacatgtattaataaaggaggtgccctccatacatgctgcacctaacagaatgttgccaaataagaatgaaaaatgatgatatttgggctgtaaaaactagaagtcagctaaataagaatgcatcgaaagtatttgtgaatgcttacaattttataatgccttggcatccgttttggatggaagttggactttctcataccagaagcagggctcagtcacctttgaaatagtttccagttctccacctccttccagttcctcagtgtgattgatcagatatctgatttatacaactgcctcctggtgacctcctccctatgggacttccggatacagcccgtatgactgccccactgaccccacaccctgcctgctgcagtgaccacctctaattacctggatctcatgtctgcttgcattaaatccaccaattaaaactccctgaggacaatctgtttgaataatattctgtaccctaataaaggccttgacccatgggttccccctctgtcctccccatactgcccctgacctctgtgtgtgtgtgtgggtgtgggtgtatgtgtgtgtgtgtgtgtgtgtcctccagacagggcctgtatcccccaggacctgtaagtaataaatctttattttcatcttatgtctctcgcaatcattggcaagagctctgcatcttaaagatcgcaaatttaagaaattggtgtagtcggcacaatagagtacctcttctgtttagcacaagatatctcggagctgctgaggcttttaacatcctcgccggtgtggctgcctcactggtgaggccgttctgttcagtgcaattcagttgctccactgtgtgctgctgtgttgctgctgtagagtgctgccatgttgttctccccaaattgttaccgagtaggaacctgtaatgtgctcccaaggtggtctaccccatgagaagggggattctccatctagggcaagggctaggtgtgtttctggaatcctaatagggaaggcatccacagagggtgaactccactcctccttagagtgaggagtgacatttcccatttattttccccatggaggtgccatgtattgactttttctttcactgtcccaaggttgagccaaggtgagctatggagaccagggcaagataccatttctgttagcaaagcaaatgggtgacaacgtgtggagaagctgtggttctcctgatggatatagcagagtgccatttagtaaaatcttgtcaggaggctgcccctggttagaccggcagtgtctgtagtcactaaggtggatgcgaattttaggccctgggccatggataatccctgcagacacagccgtggcttcatgtgatggggcaatcccgggctagtggctcccttgtttctgcatttcttgctgtggttgcacaatcaacacctcaggggttgattgggtcaccttggaaagagaaacagctgcctaggaggctggtgcacatggaggccaccctcaattttattctgctaacaagttgtaagattaaaacaacagggggctttgggtaccatcaggaacttgtcaagtaaacatccaaagacagaaagaagaaaaagaaaaagacattaaccgtctagaaatacaagccattttaaagattttgcttaaaagatgcgcttgggctgggagcggtggctcacacctgtaatcccagcactttgggaggccaaggtgggtggatcgactgaggtcaggagttcaagaccagcctgaccaacatggtgaaacctcgcctctactaaaaatacaaaaaattagcagggcatggtggcaggtgcctgtaatcccagctacttgggtggagaatcgcttgaacccgggaggcagagacggcagtgagccaagatcgcaccactgtactccagtctgggcgacagagtgagacttcatctcaaaaaaaaaaaaaaaaaaaaaaaaaagacgggcttgtttcgtcgttgtggagtcatcccagagagaggctactccctagagtcactgaccacctttcctcctccatcttttcctcttatcattctagagacagaaaacaagaatctcagctttaggtggctaacctcaccccccaagaaaagaaactaccactttgattgactacaaatccaagaaaaataaaagagaaactttaaaaagtactgagcaaaccacaggtctagcaaacataatgctagccctaggttacttattcatttacaacaaacccctagatataggaggaaaaaataaaaggtaattaaatatatacacatacaatattttaatataaatatataataaatagttaaattatgtatgtataatatgtaactaaatcaaagtaaaatttcatactttgattctattggaaattcaaaattcatttattaacttatatattaaggaatttatgtaaaaaaagatttttaaaagggcaccaatttgcttttgtgtctctacaacataggatctaatttaactttacatttgctaaatacactaattgacaaatattcatggatttaatcaatactggggctcaaattgtagccacacgtgggaatcccataaatttaaacactctgtccctattatcttgagaagaaaactaaatataaaattgaaaaaaacaggtatgtctcaatttacctgtaactttgcctaaatttcccggagtcatatacccattgctgtaaaacattctctattggacataggtgctctgagacaataaataaaatagaagtgtttttggtacttagacattggcttgacaaaatgggatcccatgaaacctcagttaagatagtgaatacggcccaatgtgagttgaaatggggcctttaaggattaaaacttattacatgaaacctagtaagtaatggggtgattatccatactgcttctccatttcatagcccaattttgacagttgtcaaatctggaaaaaacaaacaaacaaacaaaaaaacccctgggaatctgttgcctcacagagacacaaagtagacatcaaaattgtatatctcagttccagttccaaaatggtggcatagaagcaagctggctttactccttcacacagaaaaccaaaaacaaatatacagcaccaaaattattaccagatatattccagaactcaaatatgaaaatgaaacagttttcagagccacagagaagtgaaaaaaactcccgacagatgacaaaagaatcagatttccccatctgtaatgtccctccctgccccattctgcctggtaccaggtgtgtggaaaattttaccccaactcatggtttctacactgggaaatgtaagatcaatgcgggcaaccagtttctgcacaatcctgggttccctgtccctgccttaacccacaagaagcattgtgagtgcccgaagggagaaatttccctgaggacagtcaaagagtggggaggcaggactaccatctccttccctggaaactctgctgtgtaactcagccaagggagacatgaaatcagactggtgtttcagcagctccatgttgtagtaggtttgtttcacaggtatcctgggcatggacatctagccagctttcccacactgccaggatatcccctttgggacctccctcagttaggaagggcacactctgatcatttactagggccaaggtaaaccctaaaggtaacttagagatgaaaaggaggtagtgacctagcagtaaagaactctaagaaaatctatccaataaaaatcaaaacaagccagacaaagactaaaataaataatgaatccttcaatgtaaagacctggacttacatccacaagaaacagtaagcaggtaaccatgatctccccacatggacaaagtgaggaacaagtgactgatcctgatgagatggtgatgtgtgagctctctaatcaagaattcaaaactgcagttttaaggaaactcaatgatcttcaagaaaacatggaaaagcagttcagaaatttatcagagaaatttaacgaagggattgaaataatttaaagaaaacaaacaggaatcttggaattgagaaatatatttgctgaacaggaaaatttattagagtctctcaacagcagaatggatcagaggaaagaatcaacccaaataagactcccccaaggcataaaataatcgaattctcaaaagtcaagggcaaagagaagattttaaaacagaaagagaaaagaagcaaatggcataaagaagctccaattctgtggcaacagattttcagtggaaatcatacagaccaggagggagtgacatgacattctcaaaatgctgaaaaaatattgacatttgagaatactttatccagtgaagttatccttcaatataaaggagagagaaagtttcctagacaaacaaaagctgagataattcacaccatcagactagtcttcctgtaaatactaaagggtaaatactaaatacttcaatgtgaaagtaaaaaaaaaaacactaacatgcaaaacaaccacaacaacaataacaacatttgaaggtataaaatccactggtgaaattaagtacgtagacaaacccagaatactcaaatagtaattgtggaaagtaatccaatcataactctagcatgagtctcaaaatataaatctatcaaaaacaataatacattttaggaggccaaggttggcagattccttgaggtcaagagttcaagaccagcctggtcaaaatggtgaaaccccatctctaccaaaaaatacaaaaatttgcagggtatggtagcacatgcctgtcgtttcagctatttgggaggctgaggcaggagaattgcttgaacccaggaggtggaggttgcagtgagctgagattgcactactgcactccagcctgggtgacagagggagactctgtcttaaaaaaaaatagctacctgtttggagaaaggtaatataaaatatgtaaatagagacaaagtcaaaatttgcaaaggatgaaattaaagagtagagtttttttggggggttttctgtttctattattttatttgtgatctaagataagttgttaccttttcttctcttgaagatactttgttatatctatgtttttggaagtcttatggtaactgcaacgcaaaaaatctatgatagatccactgaaaataaaaaacaatgacttaaaacatactaccagagacaatcaaccacaaggaagacagtaaaaaatgaagaaaggaagaggggagttacaaaacaaccagaaaacaggcaacaaagtggcagtagtaagttcttacttaaaaatattgaacactgaatataaatggactctattctccaattaaaaggcatagagtggctgaatgctgcctatatgctgcctacaagaaaccacttcatgtaaaaagatacaaatagactgaaagtgaagggggtggaaaaagatatttcatgcaagtggaaaccaaaagagagcaggagtagctatactgatatgagataaactacaaatcaaagactataaaaagagacaaagaaagtcactatgtaatgataaagcgctcagttcagcaagaggagatgccaattataaatatctatgcatccaacacttgagctcccaagtctcccaagtatttaaagcaaacaatagtggatctaaaaggagagatagactgaatacaatattaattaggggactttaacaccctgctctcagcaatggccagatctttcagacagaaaatcaacaaggaaacttcaaagttaaactacacactagatcaaataggcctaactggcatttacgggacatttcactaactatctaactgttacagaattcacattattttcatcagcacatagaacattcttcagaacagaccacatcttaagtcccaaaaccagtcagaataaattcaaaaaagtttatatcacatcaagcatttgttctgaccacaatggaataaaactacaataaatgaataactttctggacacatacaacctaccaagatggaagcatgaaaaggcagaaaaacccaacaaaccaacatgaaactgtaacaaaaggaaaacccaggaccgaatgacttcactgctgaattctaccaaacatttaataagaactaaaaccaattctactcaaaatgctttaaaaaattgaagaggatggaacactttcaaactcattctacaaggtcagcattatcctgataccaaaaccagacaaggacaggacaaaaacaaacaaacaaacaaacaaacaaacaaacaaaaaaacactacaggattgcttgaggccaggagtttgagatcagcctgggcaacatagtcagaaccaatctcttaaaaaaaaaaaaaaagaaaaaaattagccaggcatggtggcatgtgcctttagtcctagctactcgggaggctgaggtgagaggaccaattgagcccaggaggttgaggccgcagtgagccatgtttgtgtcactgtactccagcctggggaacagagcaagatgctctctcaaaaacaaaaagcaagctgggtgtggtggctcctgcctgtaatcacagcactttggaaggctgaggtgggagaactgcttaagcccaggagttcaagaccagtctggacaacatagggggactccatctctcaaaaacaaccaaccaaaacaaagccaaaaaagaacataggccaacatcactaacaaacatagatgtaaaagtcctcaataaaatattaacaaaccatgtttagaaacacatcaaaagagatcattcactatgattaagtgagattcatcccagggatgccagtatggctcaacatatgcaaatcaataaatgtgatccatcacattaaagagaaccaagaacaaaaaccatataatcactccagcaagtgcagaaaaggcatttaataaaagaatgggttgagggagtggagcccatagtcagagcagcagtggtctgggattttggaagtagaaagaagggcagcaccactggccaggaccaccagggaacacccccataggccctgggtgttgtgctccagggagggttccctctggagttattaatcttggtgtccactttgcccagctgcccctcacagggtcagggaggatgaagggaaagcttccttctaatgaaagttcagggactcacagttcctagagcctgtagggagaggaagatcttcgaggaagagcacctgggcattggggcgtttgagaggaagatctatgccaggtccaagtggacaacctgtggactctctctccagggacatacgggtatctgggaatctcctgtagcttaaagaggtaaagacctctccctttagcctgaggactggaggatgctggttcaggtgaatgagtcctgcaggggctggtacaggcctggagggtggtggtgtccagggccttgggttcacccttagcatgattcaggccgggcggtgtttcacatgagcaagagggcctgggttcattgcttcaggacaatggtgaaatctcatggtggaagaaatcttgtccttgccagtgcccagctttcatttggtcttggcccagagtgtcctccctagagaagactcttgtcccttcttcacactgcccttcagggatatgccagccttatgggataagatggggtggagactgtagatgtgggtgggaatctctccacagagtgctccttctctcagcggttgcaccttgtctcagggcttcagcttgaaatctgggatctccaagcccttccctccccagtcctggccaggaccacatgggcagatgcattgtgtgaagtgcatttcatttggggtgtcctctctgcatggcaccctcccgttgattctctttgcgcatgtcagagtgcaggcaccatccacacctcctgctggaggagggacggagctgttgactcctgagagctgatcatgtgttcccaccctcacacacaatcatggtccatcctctgagggacatgtgttgccaccactgtggagatggtgcaactgacagtaacaaacagtaaaatctggtactgaatgggaccttaagccaacaatgacaatgtcattccaaggtgtttcatttttattgattcaatgcaagtcacctgatttcattgactattcacaatagctcgataaagtaaatgcatcatcaccaccactttaaagaggaaaaaggtgcttgggcagtttgtgactactgtggtggctgctgcattgctctctggtaaagccaagtaggtggtgggtgcggcctctgggctgggatgatccaccctcctggtggtggcaggggagccaagctggagccatggcctgtgcagtggtagcagctgaactgaccgctgctgcaggatttgcaagctgttacattttgcgaagccatgaagcacataaaacctcaagtagaacaagtgtttcaaagtctaccaaaatctgccttcagagattattactacagaggtggatatgaacccaaaatgacaaaacgggaagcagcattaatactagataatgaatgaacactagtaatagtagggtaagccctactgccaataaagaaaaaaataagagatgctcattaacatgttatgctcttaaatcacgcagacaaaagagggtctccttatatagtagccacaatcaatgaagctaaagatttactgcaagatcaagctaaaaacagtaggtgtataatgaatttttaacttcatattagtttatgtatatgaatatcaagtttttataataaaatgcctccaaacaaagaatatttgatttagggtttaataacttctaagaggggactcagatgtttcctgtttcacagtcagtctgagagggtcatttttcctggagctgacctgggtggaggcctcacactgatactccccagcatcctctctcctgatggggtttatgctgagcatacagtggccctgggacagctccattctctccatgagtcacagacgctggtcatggaagatccactggataaggttccagagtcatctgtggggcaggtcaggatcacaacatccttttcttctgtgactctggtgttgctgactcagatggggtcggagccactgaccctgtggacaatcagtggaggtgctcaactgaaagtgggctgagggcacgtcttctcctccatccctgggtccttaaggtaactgtggaccccagaccaactgacacaggagctagaaagaaattatttaggaagttagtgagggtaagagcgtccttggcaaggtttcccctttaacaaaaagcagcccaagataattccttttctaacaaagagcagcctgaaaaattgagctacagatgtagatgagcaagatggaagcttgcacaggtgaattccagtaggtgtgccaatagaaaagggctgcctggaagccaggtatgttcaacatggagactccatcctcccttttctccattaccacatgtacagtaaaaaaccaggcaacatggcaccggccaggtagacaatccatctgcatgacaaaagatcagagtggggcagccagcaaatggcacagctggtctaaacaatctttcaccccctgtataaatcagacactgcctcctgaagctcatctataaaaccttctgcatttcactatggaagtggcaacccattttccccaggacccctctctctgtgcagagagctcttctctttctttcccctatgaaacttccactcttaacttcactctgggtgcctgcatcctagttttccatggccatgggacaatgaacctcgagtattaccccagatgaatgatgctgtttcacaatcactggttcagctcccttcttcttagggtttcacagctcggtggggagaataccacgcctcagtggtctggggagtgaggaacaaatgaagaattaatcagattttacttagaacgctatcacctgcctcaaccatcagatccatgttgggaatgtccaggcctcctctcttagatctatacccacttcactggacctgaaatcctgtgtttcccgatgtgttggtgtcactcctatgagaggataaaggagagaactttgctttctctccccactcacaccctgcacaagacagggcccaatatgagacacacactcgctcagtagttctctcatgaaggagggagggagtgacctcgagtgattctgccatctgtagtctgtgtaccctggccagtggctgtatcttcatatgcctcagtttcccctcagtaaaataggacacacaatgagaactaaaaataaaattctaattccccagtgaactgaaaggatggcctcttggccaagcggatcccagagttcctgatcatgacaggatgggaggttacacctcattacagcccctccctttggaagtttagaggtgacaactgactagcattaacgctaaaatcgagatcatgagactgacagaacagactctctgtggccataagataccaaattataaactcaacctaaggtcatgcaggcaagggctaagccacactttcctacatttaaagaataagctatgttctaacacagaattttctttctctctagcggctaaagtaacactagccttcgagataagcaatattgaaatgatcgcggctcatccaccaacactggctaactgacccctgttccaacagccacaactacacttcaattggacaggagactgatttcagtaactttctcctaataagagaccactgagcatggcctggttctgctggtatacagacacggtgcactgagtaccataatgcttgtttcatcttttgatgtataagacctaatttaatacatttaaatctgaattctccaccccaaagtgaacatggggtgcatgtagcatgcatgtttgttgatcacgcatgtgcgtgtacttcctttgtgagtatccatagctccacctataacctgttgaatatgtatacctggccaactcattcagcataaatctatcttccacattcccctcccttgaagtgcctgctattggtctctgctggaggctgcatcttctaccctggggaatggccagcctgcaggctgtaaccctgtgtaagaaataacctggttgggtgcagtggctcacacctgtaatcccagtggtttgggaggttgaagtggtagaatagtttgagctcaggagccagagactagcctgggcagcatagcaagatcctgtctcttaaaaaaattttagggaggagagtgaggatcagaaaaaatacctattggctattatgcttagtacttggatcatgaaataatctgtataccaaacccctgattacatatataacaaacctgcatgcgtatctttgaacctaagataaaagtttgttttaaaaactatctgggtgcagtggtgcatgcctatagttccagctactcgagactgaggtgtgaggagtgcttgagctcgggggattgaggctgcagtgaattatggtcccacctgtgagtagccacttcactcaaacctgggagacagagcaagaaccggtctctaaaaaaaaataaaaatagaaaaataaaatgaaaaatatatgaaataaagtctcctttccaaacgtacagatctccgatttttctgccaacaatgataaatggtcagtggcttgccatgttgtctgtgaattacttttaaaatattcacgatcacctgacctaaaggttggtaccaaggaaccgcctgaatacaccgtctctgattatttgcctccaacagagtgttccctgggcctgatctctggtggacaatgagctgctgggaacatcctctcttctctattcctcccctggggatgctgaccttcccttggagtctcctaagttccccagggcagtcggctaatgtcctagggagcttacctgtcttctccataccaagtctcatgtgaaggacgaggctttgcccttgcccagatgaggctctgggggctgagccctggctggctaccagctgcaagagccatggcccttggacagctggtaaatccttgttcccagtcagccctgcccaagatgcctcaacccagccccggcacaggcttcccagggtcacatggagtcaggatcctgggacaggggactggacaggggtttccagggctgagtttctgaacaggggcttcccaggggtcccctcactccaggatctgacatggtcctacaaggaacgtccatggggaggggacccaggagggggaactgacactgacctccccttactgagcctccccccaaccccatcagactgtccttcctctgtagcaagtgcctgcagggtctggatgcaggaaagaaattctgatctgtggaagtttgtctcccctgtgtgtgtcttgcactaaatgtccaaacccccaaatgggatgtaatgtagagggggacacaggcacagcccaggcctgaaaatcctgtgtgtgtgaagcagaactgacccccaacacccagagctcatgagacatcactgtgtacgtgaaactggccagttacttcttcattcacaagatctgtttttatgacttgtagggtgtaggatcctgtgtcattgttggtgacattctgtatcagcagacatgtattggggtatattgtctctcagcctctgtggcaggtcctggggtaattacttgagttcctagtacatatcctgtaattcccctttgtaccagttgtagccaagcctaaggcagattgtgggtgagtggaagaatctccttgccttctgcagcttcaacagtgacttgggcagtggtaggcaagttccagaaagttaaaagtgaggctaggagtggggagagagcatcagttaatactgggccctatgcattgaggtggaaagatggggccctaggtcctggacaggtctcttcatccctcagccttggagtgtgtgtgtgtgtgtgtgtgtgtgtgtgtgtgtgtgtgtgcgcgcgcgcgcgtgcgtgcgtgtcctactgggccaaggtcagcagcatgacctcccttccttcagtgcctctgaccttggcatttccctgtttggagtccttttccccaggggtctgcctggctccctccctactgccttcaggtcctgctcacattagggcatccttgggagaccccttccctgacacctctagagaccctgggtcttccctttctgacctttcgctgctgtgttccctccagggctcttgtcaatacttgacctcacattctagatacccttgcatgtctgtcttcctccctatgagagcatgagctctgtgagaacagggacttgtgtgatcttggttgcaccccagtgcctgggacaggctgcggactcctgtggatgagctcatgagtgttcccagggcccttcacaacgtgggatttattttccaatggctgaggttgttggctaagagctctgttggagttcaatcaggctggtgggaaaaatattagagatagttatagagatagacacaaatcttcttggaagaccaaaaagtttgcataactttggtaatagatctgactgaaggtggtccctttacctttagttaaacaaattaaagtagtaacaaaggaaggcagagtagtttgtctagccagcttgtttactcatgtgatcttaagactaaccattgatgtgccacaggtgcttaattgctttctacttgggaagtccacaatgtcaattaccctctaacggtgttgactcaagcctttgttaattaatcttactgaataaatatgagtctcactagctgatcaaggccatggtcacaactgtttataggactcagcagggagtctgtaagcggccctgacagactcagctggactggcaaagcaaaatatgtgtgtgtcagtgtacactattcacccgtcccccacagctggtgcccctatatgaggagtgctgccacagagctctgtttagtgtcccttgttttttttcttgagtattaccccaacttaaattgtgattattgtcatctgttttcaacattaactgctcagtgatgattcacttggaaaacattaacaatcgagattgtttcttcactaacaacctcagattatttagattttcctgttgtaatcccttcttcctgtttagtgtccaacagaagccctctgtccctctcaggtccccgttctctccaagaaaccccagccagtctctgtgctccctcctcccatccactcccagggagccctcccctcacctgtgagcagaagcgcctgccagggatgtgcactctgtgaggaggggctgagggaggccccatgggctctgctgtctgctttgtcctcctctgtggagaggagcttgggcttcagaaaataaggaggccagaaagtaaggaacaggctgagaaataatggggatgtgtcgaaaggtcacagatgccaacatctttgtcctatgcaatattatccataaaattacaggtttgagatatgcttaaattttcttctaacatgcattaaaataaacatataacttttaatagttatattaaattgtatttaatataaattaaatgctcttgtcagagctactgtgactgtcagctctgctgtccttcctctctctgtgctaagcctcctcccagggcagaagcacttcccagggccaggggtgggggcggggaaaggtaagtggcaatgaggatctgcacaggtagcctttccgcctcctcccctctcagtcctgcctccttgtcttcttttcctctttttctccaatctacatttcagttccttagaccacgctgtgagaagcaaggcttattgggacccccatcccttaacaggatgacctgtgctccccataagtgacctctgctgtgtctagggattggctctgtcagcacctcacagagagtccctggggcccccaaactcagtgttattttctctatgacacagaaacccctctgggtatgcaaggttttcctcatgttttctaatgtctgggaaggttggatttactcccagcagggaggtcacagagatgtccagggagtggggtcctagaaatggacaaatctagagctaaagcccaggtctacgattttcagttgtttttttctgcagtgctatgtgaccctaatttcctaggagtaactaaaatgcaaacctcagacatttgtagacattttatgatttttctctacagcttgtaccactgttattattatttgctttatgctttttcctaaataaatttactttacaaaacatccttgtcctagtagggtgcaggggctcacgtctgtgatctcagctgcttgagaggttgaggtgggtggattgcttgaggacgggaatttgagacaaaacatctttgtcctatgcaatattatccataaaattacaggtttgagatatgcttaaattttcttctaacatgtattaaaataaacatataacttttaatcatcatattaaattgtatttaatataaatttatatacaatacatttttatataataaattatatatataaatgtatatataatagtttttcttttttgagatggagtctggctctgtctcccaggctggagtgcagtggcacgatctcagctcactgcagcctccgccttctgggttcaaacgattctcctacctcagcctcccgagtagctgggattacaggcgcctgccgccacgcccagctaatttttgtacttttttagtagagatggggtttcgccatgttggccaggctggtctcaaacacctgacttcaggtgatatgccgcctcggcctcccaaagtgctgggattacaggcatgagccaccatgcctggcctatatattttatataattatataaagttttctataataaattttatataataatatataaaatggatatttatttaagataaagttattagttttatatatttacatatatttaggaataaatgtgttactgtgggagcccagtgcccaggcaggtagtcagtacatgatggttgtcattagggttaatactttggaattctggattttttcccaagagagtgtctacgctggaatattgggcttgtggctttctgctgatgtgcatgtgtgaagaagctacttccacttattaggacttgtgtatctgtctcgcagtttcactacctattttctcgtgatgttggtcaagtcgcctaacttttctgtgcctcatttacctaatttgtagaatatgggtaacagtacacaagtgtgagtgtgtatttcccaggactgaccactagagggcgtgaaggcaccggcacttactattacagcaatgggtgtagtagtgctcatggtcgtaaacatcattctcccatgaaaggaaccagggcttcctgggagaaataactgattccagggctggggccggaaagcacaagcggagcctggagcatctcgtgaggccagaaagtaaggagccggctgaaaaataatggagatctgtcgaaaggtcacagatgccaaccagaaggagctttgaatgaccaattttgagacaaaatgagcactataagaaataatgatagtaataaattccaacccataaatacccatgagttcctactaatataaataaataattgaatacataaatatataaggatgaagaaacagctttttcttacagcagaattccaattaatgaatgtagaaggaatgatcaaatagaaaatcactatttggctaacagcacagtcaattgtttgtaggcaagaattatcaatggactttaaatatgaatgggtaaaagtatgatgatgctacaactagtgagtaccaagggggaaaaaaaagtacgttgagaagaaacaggctacttccatattcccaaagtatcacttcaggagctacttattgattataatgggacaaatagtaacttacagtagagaaacctggcaacagagtctctccgaggtacaaaggctctcttcaggaaggaggtaaggggaaggaagaagaaaacactgtcctgcctcaattatttgctttccccattctcaagtgtacttcatagacattcaaagatatgtgttgatagtgtccacgatccacatggctctattatagtcatttattcacacatacattcagtgaggctttgagtgcctaatgtgtgcctgatatttgctagatggtggatgctgagaagatcaggtgtgctgctgtctctagggtgactgaatccacctgccccactttacagatgtggaaattaaagtgaaaaggatttataggattagttcactgtcacaaggtcactagccttaaagttacaggagtaaagcaagtttcctgacttgctagattttctgctgcaggtgctgacaatggtgagctccaataggagagaggacactcagagtgaagtgggagccctgaacaccctggattagccaagaggacatgccgggtccagctgtgaccgcacaaaggaccattggggatatttgtattctctttttcacttagagcttgaaatgaggaaaactaagtgcagaaaaccaagagtggaagatttttcacaaagcactggtaacatgcatcagaaaaccctgtgctgatgtctgtcacggtgtttctcactgaacggtaatagtctggctttgagtgtgttccctctacagcctggagttctgcgaggcagggaccaggtgtgattcatctttgtctctccagtgacagtacacagcaggctctgataaatatttcttacaaaataaaatggaataaaaagtagacatctgcacaggtgtgggatgactgagcagcagcagaagcaggaaaagtcagcgtccccagatcagctgatgtggtgttcggattctagataggggtgaggtgccaggatggggatgggggtcctgtggctctgctgccctgggggacacccctaggtttcacagtgcctgctgtggttgctgcactttgcttccccatgggaaagtgatcagagggtgtggggcttcaggtgaccccatgtgggaaatggccaagggaaggtggggtgggcggcacatggttttttttaaccaatatttgaaggtaggttgtatgaaaaggtgttaggcttatttcagcttatggggagtaggacagggattggtgagtgtgtatcaggtatattttggctcaggatggaaaagaactgtcacagtaacataaggtcttttgggaaattacatgtttactggcagagttcaggccagggctgggtgtctgaaaatacctgtcagggtcacttttatggttacaagggcagagcttggcttggaaccaggtttcttactaataccacatattaagtattataaaaactgtcctttgcaataggacattgctctatgatgcaggttgaggtccctctgtttaagtaattgtgggtggctgtgattctctcatctagtctgcgacttggacttcacctccatctgcagtccctctcctttgctgttgacactggtcagagttaagcgcatttactgacgatggtcacagggtggcagcactgcctctctggtattttctaaaacctcttcctggaactgagccagtctaagaggatgtcatgactaagaaaagggcactaatgaggtgaacagataattttttttttcttgtttctcctgtgaagtaacagagtggaggtgagcatggaataattgccttttagaaatggaagacaatggagagaagtgtttcgcaaaccttaatgtgttcacagatcccacacagatctttttattcaatacagattctgatttttctggtgaggcctgagattgtgcatgtctaaggagcttttggatgatgccattgctgctggttggcggaccacactttgagtagcaaggctcgaagatcatttagaggttaattctcactgcatctaatttatggatgaaaacaaaccaaggtccagagagagcatatacagcttgcctaacaaagccattccctaagtgcctgacttcttgcatttaaacccagggcttcagcctttgtccagttctcactccacacatcacacggtttgttcactgttgtgaacgacagttgtggcagcatctctttagtttaggaatccagagccccaatttcactaccctctttggtcttggctcatgctgtgacttcgaatagttttgcccttacttaaaatcttcagtggctcttttgtaatcacaagatcaagttcgaatatctctgtctagtgttcatggctttataacatatggtatctctttagtaaccttacctaacttccctgttttaaaattgtctcttgctgccatagccctccttgctccttcctgctccctaacaaactgtgttcacttctctctcagtggtagtgatgatggcatggcctctgatgttagactcatgtaacttctaatcccagatccaccaccaacattggcaagttgattcatctttctgaggataagcatcctcctctgaaataaacttagatggcggttgagaggggtaaataaaataacacacaaacccactctcatccctgagaccctcttcaaaactagcatataaaaatagctatttgaagaggttcagtgaaattcaaggtaacacagagaaggaattcagaatcctatcagataaatttaatagactgaaataatttttaaaaatcaggcagaaattctgtagctgaaaaattcaattgacaaaccgaagaatgcactaaatctttcaacagcagaattgatcaagcagaagaaagaatttgtgagcttgaagagataatatatgaaaactcagagtcagagagacaaaagaaaaaagaattaaaagaataatgcatgcctacaaggtttgattattaagctactcaaagagatacaagagaagggtgaaaaccaacataaagaaatgtaaaaaacaatcagaatataaatgaaaaattttctaaaatgctagctagtttttttttgagacaggctcttactctcatcacccatgctggagtgaagtggcacagtcatggctcactgcaggctcaacttcctgggctcagatgattctcccacattagccttccaagtagctaggactaaaggcgtgtgccaccaggccaggctaattttttgtatttttagtagagatggggttttgccatcttacccagggctggtcttgaactcctgggctcaagtgatccaggagattcactgccaaaaaggatataaccaagtcatatagtcataggttatctaaagtcaatgtgaaggcaagaattctaagagcagtgagacaaaagcatcaattaacttataaaggaaaacctatcagtctaacaccagatttctcatcagaaaccttacaaaccagaaggtattggggtcctaatcttttggcttcttaaacagaatagctctcagccaagaatcttgtgtagagtgaaattatatttcaaaatgaaagagagaaatacagtctttttcaggcaagcaaatgcttcaggatttgtcacggctagaccatcctacatggaatgttaaagggacttctaaatcacaaaacaaaagatttaaatagaacagaatagaacctcttgaaaccaaaaaattcaaatggcctataaaacaataacacaataagaaaacaaagtagataacgatcaacatgatgactggaacaaatattaacattgaatgtaaatgacctaacactccacttaaaagacacagattggcaagataaataaaaaatcacaaaccaaatatcagctgtcttcaagagactcacttaacatgtaaggattcttatagactcaaggtaaagagatgataaaagatattccatgcaaatggaaaccataagtgagaaggaatagctatccttatatcatataaaacagactttaagcaacaacagtaagaaaaagacaaataaggcaactatataatgataaaaggatcaatcaaacaagaagatattacaatcctaaatatatatgcacctaactttggagctcccacattcataaaacggttatgatgagacctaagaaaaaagatcaacacaaaacagtgagggtgtcctgggttttctttttattggacagcagtgtactagcctatcactttcccagtcaggggatttttggtctccccattcccctaccatgggttcatgccaaagtccatattttttattagtgtttggaattggattttttttttttgaggtggagtctcgctctgttgcctaggctggagtgtagtggcacgatctcggctcactaacctctgcctcctgggttcaagcaattcttctgcctcagcctcctgagtacctgggactacaggtgcatgccaccacacccagctaatttttgtatttttagtagaaacgagatttcaccatattgtccaggcttgtatagaactcctgacctcatgtgacagggaaacaggcactcagtgaacttcatgcgattgaggagttaatgataatgagagaagggctgtgaggggacagcactggggacaccagagcctgtgacgggctgagttgctgtgccttgggagatgcccttttgactgagccctgggaaggagggggtgtgggggcaggagctgcctgcagagggagtggcctcaggtgggcggccacctggctgcagggaagaggtgacagagttcgtgtgcagagcttggagggtgaggaggaggtgggttgaggtgaccttggtgagggtgaaccatggggggctgtgggccctgctgagggaggccagccagccctggacctacagggtggtttggtcttttttgtcccattcccagcatccactgagtggtgaaactctgcaggccagggaccatcccactggccagaaggagcgcacagtaggtgcccactcagtgcatgttgggctggacagaacctcactctgccccctgcccccagctttgggagctgcagcaaggtccctccccctagggatctccatgcctctgtctctgaggggtgagatggggagacttcaaagggccatctcagagtgtgggggatagagacgcagaagtgtgggggatagagggaggcctgggctctagacccaaaggaccttacacacctcctgagtcttttcaaatggtttcttctgttactttaaaaatgatgtaagtcatcatatttattgtaaatcccaggaatctaatcatgcgtaaaataaggtgtcttatccttgaccccaccccttccccaattaaatttccaggatgttaccactgtttgcagttggtgtgaatctctctttaataatactctgtttatctcacttgtcgttttacgccaaaatacccattgaattatattattgctgaagaccattcttttttttttttttttttttgagatggattcttgctctgttgcccaggctggagtgcaatggtgtgatctcggctcactgcaacctctgcctcctgggttcaagtgattctcctgcctcagcctcctgagtttctgggattacaggtgcacaccaccacacctggctaatttttgtatttttagtaaagacagggtttcaccatgttggtcaggctggtctcgaactcctgacctcatgatccaccctccttggcctcccaaaatgctgggattacaggcatgagccaccacacctgcccagaccattctgttctactgaatcatgtgtggtgggcacctcttatatcaatacatatggattttatcttgtgtttgttattggctcccctttttctcattgcatggctacactcaatgctttgtccacacccctgttcctgggttggaatcttgtgacagaaaatgaagtaacaaaggctaaagctttctaaagtggagtcaggagattgcaagacaattgcactttcaccagcaagagctcaaaccacagaatgttccaatagatttggataaacagctgaagtcagtattcaccagccttcaacatctcaactaggagaaccctaaaattaactaagcacatagaatggaatggacttgtgatttaggattccttctcagccaatgagctgcttctgaaaacaactttttgtggaaattacctgtaaagaaaaccctctcctgtgcttgtcttacagaacactagtcagggctgccctgattcagtggacccgaattgctattatttgtttcctaaacatatggtattttctgtgaccttcatctcaatcttttttttaagttactgggctgtttcccagttttcataatgacgagacattctgcagtgtttcatacacatgtcttttccccatgtggagtattgatccaggagctcattcagtcaacgcatgtttatgaagcatcctgtgccaggctgtgggctggtcactgtcttcagcagagagaggacaggcacagtcttgccttcacagagctcacagctcagggaggctcttagaagtgggatactggtcggagcatgtgcacattaaacatgatgaggtcaaggttgctatagggactaaaccacagtcccaccaagatcgcattgagttcctgtggtagaccagaggtcagggcccctaagatgtcctgagcagctccctctgctcagaagttttggttccacaggtgacacacctgagcacaggtgacccctgcagaacctgtgattaccacccaaagccaagagtgagtggtgggtgttctaggaggaaccgtcacctccatgggcagggttggggaagactgaggggagcaggtggctgatgactttggccagaaggtagggggatgggcaggtgtgcgctcatagggaagggaagagaagggagggcattgcaggcaacaacacaaaggttggaacctgccttcatggactgagaaaagcagggagtccacccaggctgcagctggggagggaagacatggggagcagtgggtctaggggagaagcagactgcgattgaccttggggactgggcagtgagcagaggtgtgttatgtgtgtctgtccccatcatagatatgaggaggggtgaggccgcgggtggcacctgggtcggtgggatttcatagtgcctgctgttccctagagcctctctgtatagagggtcagaatagatctgaggctgtggtctgggggaaggggctggtggtgcttaccatctctaggggtgggaggagagggatgaggatgcccctgagcagtgaagcctcaaggtgtgtggagccacagttgtctctcattagacatgtgttttgcgtgaggatgccagggcctggtggttattactgttgtcaagtttgcatgacaaggacccaggtatccagggatccagagcacagggcccctggtgaggggatgaggctcagatggggctgaccaggttcatgtggtcagagtgggagggactgatggagagacagagcctcaacccctcctgtcaggagctgtggctatgtccaggagagatgacaaggatgacccaggacattgagtgagtcattgagacattgaaggtgaggacagggcagagaggaccctggtgactgctgaaatgtaggatgtgaggagggctctgacccatgcaagttacaggacctccccacccccgagcccacagatgacccttaaattgggcatcctgagtgctgtgtgtgcccagcagggacactggataggctggacctgagtctctgtaagggcagcgctggtctgtaggaccagagtcttctctgtgggtgtgacgtgggcaggaattagcaagatgggggtgacaaggcttggcttggaggatctggtacagaagcccatgggcttggtcagctcagcttctcaggggctcagctggggctggaggagcaggatgctgtgctcagggcatgctccaggcagcgtgatgtgtgtggttccagggtcaggcacgggggtcaaaaattaaccatgaaaagttcccaccttctgtaggcagagaaaatggcctgattgtcagggtcagggagacttaccatgtggccaaagcaggctctcagcctcccagagaccacaccctgggtgcagcactcagctctgcagggtatggcaatagatgtgccaagaaccccaacatccagatgcatgcaaaaattttgcgatatataaaatagagcagatcaagtttccctgcaataacgttgttcctggttgtgtctttttcttgtaaactagacatggacatctttccagcagtctgttctcatctgccaccttcctgctgcagcacctcagaatgaacattcctgagacactgtccgtggtgctgacgaccaagagctatggaacagagtgtgatgtagaatcttctagttacctctgctctcctttcacttttaacaacagagcatcattaacaatgagaaggtggagaggtgttcaggatcttgaagtgacttctgtcttgctctcccataaccctgaagctgctgtagacattattgcagaaactgacaccacagtcaggatggccttgtccaggagcccatgtgcagtttgtagtgagcaaggatgagaaaatggtcttgaaaggggtgatggacagaacaggggcttttcaaaaatgtcacatcatcacccccagcatccgtgaatctgtcacatggtaagagaccttacagattaaatgaaggattatgagtttggaagattattgtagtttatccagatgggtccaacataatcacagaatcccttccttacaaatgagagagggaggtgggagagtcagagaaggaggaggagatgtggggatagatgcagaagacagagcggtgtcaagatgctgcactgctggctttgaagatggagaaagaggacacagccaaggatgcaggaggcctctaggaggtggaaaaggagaggaaacgcactctgccctggagcctccagaaagaacgcagccatgtgggcaccttggttcaagtttctgtgtcacttagcttgtgggaatttgtcacagcctcaacaggaacctacagaggagtcaccttgtgtgcaggtgggatccagggtcatttacagctaaatcctgatgtaaatattgcaggttgcttttcctacttcctatctcatggccaacaaccctggacaatggcagaacacccttggaaaccacggctctgtgctttagtggagggaccagcttgtttgtgggaaggtagcacctggtccaagtgaacctacatgagatcgttactctccccagggccctcagggaagggctgagaacagctggcccaggtgtgtggaggagctgcaggtgaggcagggctggaggggcctgtgggtccaggtagaggggcagacaggttgtcccatcgccatgggagcctgcacgagctttaggttggggaaccctgctcctctgacctggacgctcctgtgtggagaggaggcttgctcagtgagatccacgccagggggtaaattgggaactgatgggaaatgaggggctagagtcctgggtagtgcctgggaggaccttgctcaaggactgaattcttggtctgttcccaccttggttactctgacaacccctctctgtgtcccacggggataaagatctcctgagcagtggccattgggacagaggagaacctggtggccagagctaagcatccaggatcctggatttggggacaggcaagctcattgctgggggacagtgatagatacggcctccagggcctgggtgaagagagcaggagggctcaggacactggaggctgtgtggaggtcacacccacgatctgtaccacccatggatgctcctgcattgctcacctttgtgtggacatcagatggccccaacttttgcactcctgagacatctcatgcattcacagagggacccaggctggggctgtgcatggccttggtctctagggtagtgtgaggacagctgagcactcagctggctgggcaggactcctgcgaatcctgccctttcctgtgtagggtccaccccagcctgactcctaaccccctactcctgtctttccagggaagagagactggggttgagataaggtggagatatttttcctgtgtgacccaggagagaatggacatggagtttcaggtgagtttctgctaagttcccatgagcagaaaaagagccaatgagaggaagtttcccctttattcagatcctttccaggtgaccccgggtgggccataggcccattcactttccctgcaagcccccgcttcctgtggtgatgggaagccttcgccttggcccacccagagcccggggcagtctgttgaggtctctatatattcagcagggacccccatcccttcctgtccccaggcctgtgtctcctcaggactcagagctggttctctggctcaggctccatgtccttccccatccccagggctgggggcttcagggacgctccatcaacccacaggagcagctcccagaggaacctaagaagccacatctgctttgtggtcgatccagcagtaaatgtttgtgtcagagtgtagcaattccagtaaaaacagagaagaggtcttgacccctgaggccttctcagaacagggtctggcatctctctctgggcccacccagggctactctgggactgaacctggctgtgctcagggggttcctgctcccaggcccctccctcctctgctcaccacctcctgttattttcactgcagtttcctgaacttcagctcagccagatgccagtggggacagatcctgggtctccctggggcccaagggaccagaatatctgtggcccccactcacctcatagatgagagcagctgccctggtgctgggtaggggaatctgggcaggggagagaggggtgtcaggggacagggaaggattcctgctgtgtaggaattccagggctctcctcaggtgatggagggtcccagggtggggttagcacagggagtggatgatcctggccctgaacagaggcccagctcatggccagggcaggtctaaccttatccaagtcattctgggtagggtgggtttgtgctggggattgacagtccccctgccctgagcctgcacagctggggccccagtggaaatgggattgggaacggacagtcttacctaggagatggagctgtcagagggtccatggcctggggacagagacaaaagtgagcacgagagtgttaggatagctgggcccctcctgcaagagtgtgtgggggtcctcagttcttagagaattggggagagggagcctttctcaggttattttaggggtcaagtaagcaagtgaggttgaggaagtgacccatgacccagagcccggaggttagggctgacccggccagttggggtttcctgtgtgatgttttatgggatcctctttgcagccccagggatagggtcagaggcccctgggtgtaactggcaggagtggacaacttggggctggcttagtagttcccagccacacccagactgaagggacactcaccgggggtggaggctgggggctgctgctccctgaagtcactctgatcgctggccctaggaaaggtcagggttatttgtgaaggtgcaaggttaaaagtcacaaattggagttaaaataggggaccaggaaaggagcctatttccaagaggggtatggagacctcctttctttatggagttctgtggtaggaggggcccaggtgaggggagttgaggaaaggccttacaaagccacatctgtcctggccagaggggaaggactctcaggcagatgctgggccaggagaacattgatccagtgacacaggaaagggactgaggacccagggaaggaatcagaccaccaggggttgcctgagaggaagggtcaaggcaccagggggaaagcagggccaggcacatgtgcaggacactgaggggactgcatgcatcttggattctcctggaactcagtgtccctgctgtgaccagacactccactcagggctggagatgctgaaatgggacaatgatcttgtcttctgtctctgccctttggcaagagacataaacgacattccaggatatgccatattggggccccggttctcccttctcacagctcagtgtctgcagttaccatgtcagtcaaaggggtgctgaccccacccagcccgtccaggctgttccagtctccactatgtgataatgcccaggatcccccctcagatgccctctcactgggtggatggattcagtgaacagggggaggtaccaggtattgagcaccgctcccccctgctccaggcagctgtggctttgctgtgctaggaaactaggaccatgctcaggggcatggccttaattggactgaattcactgaggacaaagctgttgaggaagcagcccagggtcagcagctggtgaggaaggtgccatggaatgagagggaaggatccctggggagtcgggaggctggggagagcctggcactgaatacaagacagggtctccttccttctcgcctggggtcagcgtgaaggatgggagcagaatggggaaaagctgtggtacctgccagtttttcggaggagcaggaaacacacaagtgcagccaccagaagactcccaaccaggaccccgatcaggatgcctagagtgttgtcatctgctgaaagaagaaggcaaaggggatgaggtccaaatctgttccagggggaaccatgaggggccttgcagggcaggggcatggtcagggaggaaggaaatgccatggagcctgagtgtggtctgttgtgctgtcctcatagctggctcccttgctctccgtggttgcaccattttctgtgtcttaggcttgaattactgggatgcatcaactcctacattctcccacaggaagcctgcacctcatcctgctcctgtgttttttagtccctccttcctctcacatcactcctcttccccctgtttctttttttccatcccatggcagtcgtaaagggcaggcccttgctgccaactcaatgctgatgagcagggatgatgttcattgactgttttcaggggccttccacatggaaggcacagtgggaatcaatctacctgcagcttttctcaccctcccattgccttgagggagaagggtatgtgatattgtgaaatacgtatttggtgttcatcaccattgatatggttaggctctgtatccccacccaaatctcaccttgaattgtaataatccccatgtgttatgggagggaccttgtgggaggtaattgaatcatgagggtgggttttttccatcctgttcttgtgatagtgaataagtctcaggagatcagatggtttcataaagggaagcttccctacacatgtcctcttgcctgctgccatgtaagacatgcctttcaccttccatcatgattgtgagacctctccagccatgtggaattgtgaatcaattaaacctctttcttcatacattaccaagtctcaggtatgtcttcattagcagtgtgagaatggactaatacagtaaattggtaccagctagtggagtgctgctataaagatacctgaaaatgtggaagtgactttggaactgggtaacaggcagaggttggaacagtttggagggctcagaagaagacacaggaaaaaagtttgaaacttcctagagacttgttgaatggttttgattaaaacgctgatagtgatatggacaataaagtccaagctgaggtggtctcagacagagatgaggaacttcttgggaactggaacaaaggtgactcttgttatactctagaaaagagattggtggtattttgcccctgccctagagatctgcagaactttgaacttgagggaaatgatttagggcaactggtggaaaaaaaattctaagcagcaaagtgttcaagatgtgacttgggtactgttaaaaacactcagttttatgtatttacaaaggtatggtttggaattggaacttatgtttaaaagggaagcagagcataaaagtttggaaaatttgcagcctgatgatgcaatagaaaagaaaaatccattttctgaggagaaattcaagccagctgcagaaatgtgcataaacaatgaagagcaaaatgttaatccccaagacaatggcaaaaatgtctccagggcatgtcagagaccttcctggaagccccttccatcacaggactggaggcctaggaggaaaaaatgtttcctgggccaggcccagggctcccctgctgtgtgcggcctagagacttggtgccctgcatcccagccactccagccatggctaaagagggccaaggtacagctggggccatggcttcagagggtgcaagccccaaaccttggcagcttccatgtggtgttgagcctgcaggtgcacagaagtcaaggattgaggtttgggaaccttcgcctagatttcagaggatgtatgaaaatgcttggatgtccaggtgaaagtttgctgcagaagcagagccctcatggagaacctctgctagggaagtgttgaagggaaatgtggggttggaaccccgacacagagtccctactggggcactgcctaatggagctgtgagaagaagaccacaatcctccagaccccagaatggtagatccactaacagcttgcaccatgcacctagaaaagctgcagacactcaacgccagcctatgaaagcagccaggagtggggctgtaccctgcaaagccacaggggtggagcccaaggctatgggagttcagctcttgcatcagtgtgacctggatgtgagacatggatacaaaggagatcatttcagagcattaagatttggctgccctgctggattttgggcttgcatggggcctgtagcccctttgttttggccagtttctcccatttggaatgggtgtatttacccagtgcctgtacacccattatatctaggaagtaactaagcttgcttttgattttacaggcttataggtggaagggacttgccttgtctcagatgaaactttggacttggacttttgggttaatgctggaatgagttaagactttggggaactgttggaaggcatgattagttttgaaatgtgaggacatgagatttgggaggggtcgggtggaatgacatggtttggctcttcttcacccaaatatcaccttgaattttaataatccccacgtgttgggggaaggacccagtgggaggtaactgaatcatgggggtggattcttcccatgctgttctcatgatagtgaataagtctcacaagatctgatggttttagaaaggggagttcctctacacatgccctcttgcctgccgccatgtaagacatgccttttgccttctgccatgatttcaaggcctccccagctatgtggaactgtaagtcaattaaacctcatttttaaaaaaattacccagtctcaggtatgtctttatcagcagccaagaccagctcggtcgcggagatcctaacccagcagtgctagaggaattaaagacacacatagaaatatagaggtgtgaagtgggaaatcagggttctcacaggcttcagagctgagagccccaaacagagatttacccacatatttaataacagcaaaccagtcattagcattgtttctatagatattaaattaactaaaagtatcccttatgggaaaccaagggatgggccgaattaaaggaataggttgggctagttaactgcaacaggaacacgcccttaagatgcagattgctcatgctattgtttgtggcttaagaacgcctttaagcggttttccaccctgggtgggacaggtattccttgccctcattcctgtaaacccataaccttccagcttgggcattagggccattatgaacatgttacagtgctgcagagattttgtttatgaccagttttggggccagtttatggccagattttggggggcttgctcccaacagactaatacacccattttctggtatgtgactctaaagtccttagaatcttcaaagtgatgtctttttcaagctaataattgactgatgactggcagcccctaggcaacttcagaatgaggctggtcactgacccaggtaggattagagggttgggactttcagcctcacccctaatccctggggagggacctggagtttgaattaatcaccaatgaccaatgaatcaattaatggccaatgattgaatcaattaatggccaatgattaaatcaatcatatctatgtcatgaaccccaaaaggactgggtttgaagagctgaacccatggaagtttctggagtgtggtgcatctggggagggcatggaagctccacaccccttcccacatgccatgctctgtgcatctcttcatctgcatcctttgtaaagtcctttattacaaaccggtaagcctaagtatgtgtttccctgagtcctgagagctgtttgagcaaactaatccaacccaaacagggagtcatggaaacctcaatgtgaagccagtcataagaagctctggaggcccagacttgtgactggtgggaaggtggtggcaattttgtgggactgagccctctgctgatatgtccaggtagatagtgtcaggatggaattggaggacacctagctgatgtacggtgcagaactgattggctgctgggtgtgtgggagaaacccccccgcatcacatttggtcacagaagtgtgtctgtgttgatgattgttattgtggagtgagagcagaggaaaaacacagtttgagtttttccaaacagggtggaatcccatctgccaatttagaatctgaaacttatagtttcagtacttcaattaagattgaagtacttcaattcagtacttcaattaagattcagtacttcaattaagattcagtacttcaattaagattacagaactggtaagtgaaagtgatacaacaaaaatgtaaccaaagtctgctcaacttaacagctaataacaacaaagttcataaaaataataccagtcgatattgatagcactgattgagccctggctctgtgcatgaccttgttaagggctttaatcgcattaatctctgaataaatatcctcacaaccaccctgagatccaggtgtttgtaacaattctacagatgaggaaactgaggcccaggaggttgagtgtcttgcccaaggtcaaatacctggtacctattgtaaccaggatgataactggatgagtctaatccctgagttcttacccacattgctccccaggctctgaaggaatctcatccttctcattccgtgtatcattttacaccccccctccctcctaggaaaatatacaaggaaaggagtgagaggggccgagggtcactcacattttacagtcagcttgagggggtcgctcctgttggagctgactgggttggagacctcacactgatactccccagcgtcctcctgcctgatggggtctatggtgagcatatggttaaaccaggacagcttcatcctcttcgtgacctgcagacgctggttgttgaaaatccactggaaagaggttccagtgttatttgtgtggcaggtcaggaccacggagcccttctctgtgactgtggtgctgctggcttggatggagggctgagccactgactctgtggatagagtgaccaacagaaagtgtcttggggccatgctgcatcctcagagatctcagagtcaaatttagaacattctcctgtgaataaaggagaaagatgaaggacagggaggagcagagagaaccagagacacccatagcagcgagcagtagggactacagtgacctcagagaccccagggaccaggaggacccagctgcctcagaccaggaccagggagccctgaaaaccctcccacagatgagcggccccagagtcacatgagatgcaatacctggggtggctttaggagcaggcagtcagagaaatggaacatgggtctcagcccctaagggacaaggaagaggtgtggccagctcctcctaggatcctacatccaggacccagtctgtaaagaggttatgattattcctttcttttttcattaattccctccctccttcatcagagaactactgagtgtgtgtctcagttgggccttgtgcaggtacagggtgtagtgggaagagaaagctgagtcctttccttcatcctcccatgggagtgacatcaacaaatcaagaaattcatgatttcacgtccagtgagggaagaaatgtggatctgatgggagaggcttggacaatcctggcattgagtctgatagttgagacaggtgatttcgttctaagtaaaaactgactaattctccatttgcccgtcattcctcagaccagaatctccctctctgagctgaggatgcccaagaagaaaggagctgaaccaacatctggtcctggggtccacagatgccccacggtggtggccacgaccagattctgggctgcagacacacggtggtgtgacgttgagcactgacagcctgtgtgatgctgatgcaatttctctttaataaaatggggtaaatgtcaatggtccctggcttgccatcctctctgtaaattaacattaaaatatttacaattacctgacctaaagcttggcacagaatagctccaaataaacatcatctattattattttactccaaaaaaaaaaaaaaaagagttctctgggcctgattcctggtggagaaggagcggtccagagtgtcttttctctgctttccctcctcctgaggacagtgcacttcccgggacatcttttaagtttcccatccagtttaatggcctgggaagtttgtttgtctgtcctctccactctgactctcaggtgaaagatgaggctctgcccttgcccagatggggctctgggggctgagccctgcctggtgaccagctctaggaaccacggccctgggacagctggtaaatcgttgctcacaatcagccctgcccaggaagccacaacccagccctggcacaggctccccagggtcatctggagtcaggatcttgggacaggggcctggggcaggggcttgaagggctgagcttctctcagaggatcctcaggccaggccctgactgagtcctataagatctttctcaggtcatgtctatgaggaggaggccaagcggggttggactgagactgattttcccccgctgcatctcccgcatcagactatccttcttgctgtagggaatttccacggagtccggataagggaaaggaattctgatctgttatagtttgtctcccctgggtgtgtcctgcactaaatgcccaaaccccaacatgggacgtaatgcagagggggatgcaggcacagcccaggcctgacaatcctgcgtatgtgaagcagaactgacccccaacacccagaggcacggaggaatcactcaccgtatacacggagatggtgagatgcctgttcaatctgagaatttctgtatgtgacttgtagggtgtagtatcccgtgtcctctagggtgacgttctggaaatgcagatctccactgggtgatattgtctctcgaccgctgtatgcaggccctggagtcctaacgtgagtgtctattacatatgctgcgattagctggttgggctccaccgttttccctttgtaccagccatagctgtaaagattctcgggcagataaaccacagagagatgaacattctccccttcagcaacttcaaagggcgctgatgcaataaagagccaggcagtggtgggtgcgttccagaaagttaaaagtgaggctaggaaagggagagaatatcagtcaatatttgacctatgcattggcatggaaagacggggtcctgggtgcaggtctcttcacccctcagccttagagggtgtgtgtgtgtgtgtgtgtcctactgggtcaaagtcagcagcatgaccctcattccttcagtacctctgaccttggcatttccttgtgtgaaccctctttcccaggggtctgcatggttccctccccactgccttcagttcctactcacacaagggaatccctgggagacttctttcgtgaagcctcctctagagaccctgggtcttccctttctgacctttcccagctctgttccctccagggctcttgtcagcacctgacctcacattctagatctctttgggtgtctgtcttcccccccatgagattgtgagctctgtgagggcatggacttgagtgatgttagttgcaccccagtgcctgggacaggctgcagactcctgtggatgagttcatgagcgttcccagggccttccatatcctggggtttatttgctaatgtctgaggttggcagatgaagacagagtttcatgccctggtggtgtttttatttaaattgtcactgtgatatagttttactatcattttcaaaatgtagtggccactgacaatgaacttgaaaacatggaccaactgagattgttttgccccttggcaattccagttcacttagattttttggttctccttagacgctctctcccctgagtctctaacaaaagccctctgtctcctctcagagccccatcctccccaggagaccccagccagtctctgtgctccctcctcccacccactcccagggagtcctcccctcacctgtgagcaagagcccctgccaggggatgcattctctgtggggacaagctgaggggggccccatggtctctgctgcctgctctgtcctcctctgtggagaggagcttgggctccaggaacgctctagacagggttactgtgactgttgtctctgctgtccttccttcctctatgctgagcttcctctcaggcaggagcacttcccgtttatgggcaagggcggggctctgcctacaatgtctctctgtcccctcccctctcagtcctgcctcccttgtccctcctttctccttcctttttgcctatatttggttccctaggcaaaactttgagaagcaacgctgatggggtcctcataacaggacgacccactctccccagtactgacctctgctgtgttctggccttggttctgtcacagccggtagattatttccctttgtgacacacaaaaccagctgggccctgggtctcctcatgctctccagtgctccaggaaggcagaatgatgcccagcaggaaagtgacagaggtggctctgggggctagaaaggggctcactgggtgatggctgggaaggacccacccgctatcttcagtgtcaccagcctggcctctgacccagggacagagacccaggcctggaggtctcgggaggatccccagctcctaggtgtggagggaggtgtcctgtgtgtcctgggaagagaggactttgatggaaggaggtgggaggctctgggttctgctgtccttggtgaaggtttcagggggaccctctccatgtctggggtctgtgcccccagcttaactctcattctctttgcaaatacatatattttgtggatctgcagttgcctgaactgtctcatgtccctaaatctttgtatccctttttacagaaggtcaggaagggtgtgtacatgagtatgaggactatctgatcagggcgagtgtttgtttcccaaagatctctttagatatggtataatacataagataaatgtactgaattagcaattttaagtgtagaattaaatgatactaattctattcacaatgttgtacaaccatcaccataattttttaccagaaaatcttcattataccaaatggaaacttcatacttttaatcaataactccccacttccccctgccccacccactggtagcctctgatactatcaatctctgtgaatttgcctagtttacatgtctcatataataaggaattatatacgtgtattatttttttctggattatttctcttagggtaacacttttaagattcatccacgtcgtagcatatattacagcttctttcctatttatggctgagtaatatcccaatatatgtttatacctcaattttaattcattcatctcttaatggacatgtgggtggtttccacatttttgctattgtgaaaaccgctgcaatgaacttacacttggaagtatctgtttgggtttctgtgttcatttctttgggggtacatataggagtataaatatggggtcatgtggtagttctatgtttaagtttttgagaaacagccaaactgttttccagtttgctgtgctattttatattcccatcagcaatatacgagggttccattttctctacattcttgtaaacacttactatttaatattttttaaaacttatagccattctagtaggtgtgaagtgatagctcattgcagttttgattttcatttccctggtggctgatgaagttgagcattttttcatgtatttactgacaattttaatattttttagagaactatttattcaaatcatttgctgtttaaaaaaaatgggttatctttttattattcagttgtaatagttctttatatattttagatacaagtcccttatggggtacatgatttgcaaaatttttctcatattctgtgtcttctcactttcttcatggtgttctttgaagcacaaacatttttaactttgatgaagttcacttatctatttttaattttgttacttatgctcttgatgtcatattgaagaaaccattgcccaatccaagatcattaagttttactcctatatgttcttctaatggtttgataagttttgctattccatttaggtttttgaaacattttgagttaacttttgtatgggctgtgaggtaggggtctaactacactatctcgcatgtggttatccagttgttccagcacaatatgaagaggctaccattctttccccattgaggaatcttggcacccatgtcaaaaaccaatgggctgtaatggtgagggtttatttctggactcttgattctattccattgatctctatgtgcattcttgtgccagaagcacactgttttaatgattgtagtgttttagtaagttttcaaattaggaagtgagtcctccaatttttttttccagattgttttggccattctggggtgacttttaaaaaagatgtagttcaatggttctcaaagcaggagtggttcagctctccttttttggcagtctggagacctttttaggaccttaatctaagtagataaattattcccactttcttttctgagttgctatgttacagtgtatattgacacccatgaaataattgagagaccctggaagtgcttgcctacatagtgagggacaattagttccatgatcatgggcacagaagattttgttttgggaaacaattttgttggtggagttatattcatgcttactcttttatttgtcttcatagcctgcatctccttcagacttcatatctgtttattttcttgtttgtcctctggggtttgggtgttgggtgaccagtcagctggagctggaggaggtgcttagcaaggcagtgaccctggttgggaggagcagggctcagcagggtgaaagtagctgggccttgagtcaggagtggcatctggaaggcctgactgtaagggtcagaagggccagcaggtgggtgtcctaggcacaaacggtggctgctgctgtggactggaggaaggtaagaggccccgagtattccatgttcttactggctccccaactgaggattcctctcctgggctggtgctgtcctgcagcagggaggggttagacagggacggctgcacatcaggccggagtccatgtcatcctcttaggcactgtcactacagattgaggattctgttcataagccaagcctttgcacaaggaagggacccgggctctcaaggaagagcagctcctggtcagacctccatctccttctctctcattgcctgaggcctcaagcttggtctacctggcacaggggtctggatcctcctcccagggttggggtcttactgagctgggcacctgcaggtgggagaagatctggaggggccccatctgccttcaccagattgatgttgagggtccctgagtcctgcaccactatcaggtgctgagcaacttccagtgtcagtgacaaccaccccatggtggaagcagaaccacctcgtgagaaagcacctccaagcctcagtgcttgccatgtgtgggaatttgctggtttcagttgggggcatgttggtgggtggtcatgaattcagggccggattctatgctcacagtgcacatgctggatgtggtacagaccccaggcagggctcagtggggtggttttgggtgtgcacaggtatcttttctggaggagctggtggtgatttggctcccagaagttcctgagctctgcagactcaccaagcactcaatatttgagtgaacattgggcgagagagcagaaggtaagtgtcagggcatcggggttggtgcctctgggaagaggaggaacattctgggaacaaagctctcccccggcttacagggagcttcccatcgctcctgccttgaggatcagggaaactagggcctctgctcttccaggggctgcttgcaggcagtttgctctgggagggggtgacccaggagttgcctctcattttgcatttgagatttaaaaggagaagggacagtatatcttgccaggtcacaaaaattacaggcatcatattgactgaagggcactcctgtcatcactgcaatataccagaatggtcttttaaaaaaataagtgatttaggtttaccagcaactgtaatgcttgttttattcttctagttcaccgttaatgtcacttttgtagttttagcactggcaatgttgattttatgttgactctgatgattttaagctttcatttgttcacatagagatcatcttctttctgaatattaatgcattttttctctatttctactggttattcctgtacatagagtagagaatcacttttcccaaggaggtggaaagcttctgactaccaaaaaaaaaaaaaagtgtcaaaatgctttaaagtcagtaacttaaagatcaaatccaagagtgggcaacagattctgcccagggtctgaaaggtggagaggtgactggtgaggatgtttaaaagacctctcctctctactccctaaatgggggccatccagtgttcttgaggttcagagaaggcccagggctggggcagcagggcactgtcagctcccagctcccaggggccaggagtaagaccccaacactgtccagacactgattgcattcattttgggggagagtagattcttatttaaagaataatacaaaagtctacaaatatgaacataaacagaaattcctttgctacaattttccccttaataagacattccttcctaatgacatatgtgactgcattcatggctgagatgttttctaggatggtgagagcatcagagtggactatctggtgccttggggtcatgcattttcttcttccaatgtctacaggatcccccatgtcccactttgtagtgtaactcagtgtgtgtcattctggtttttgttgtatagatccttggaaagcccatgtcattcctgctgtgaggtacaggcagccaaatggcatcatctctaaacatgccttctcctggtacatcaaattatggaataaatgaaagccattttgacagatattgaagatataagtttctactcttcccacacatgcttctcccaagtgaaggattttactggtgaattgttattagagattagtgtggatcagtgactctgccaggggaaattttgccctctaggggacatttggcaaagtctggaaacattgttggttgtcagagctgggggagggagtcctgctggcattgagtgggtggatggtgctgaacaccctgcagttcacagagccccaccagtttgaccacccaaatgtcaatgctgaggagtggagagccctgctgtgccctcccgcagcttccctgaagcttcccctcacctgctcctcccatgtctccccaccacttccccacttcacccgcctccttacacctcagtcccctccacctgaactcaccccttagtccaaggccagccctgatctccgctctcctggtctccttgctccttagcaggaggcgcccactagatggcgcccttgcccttactggagctcaccgtctccctttccaccctgagacaaatgtggctgcttttactgccacaaccccagccctccacactctagatttgctcagggagcagctcctggacagacctcagggaccccagggaggagcctcactctggagattttgatggcatggtctttgaacttcactgttacccccagtcaggatccaggatgttgggagtgcatgattctgcccggtcccacttcagcaggaccccactgctgagttgtctgtggggacccgggcctctcatctccttcttgcattgcaggagagggatcttagcactgctttcacataaagtcagataatggaggagtgcaggtgagtttgggaaggtggacatgaagagaggttgtgtccctagaggtggcagcagtgagaggatgggcaggtgggaggaacacagcccatccagggttgccagccatattaggagcgacagcctttcctctaagcctccagcctttttcctgaaacattccagaactttccacttcagcacttcccactgaggctcctcaggtctgtccctgagctcccagctgagcctacctacccatctgaaatcctgagtcctgtgtcaccctcgttccccattattctgtgcagttctgtgggacgcccagctctcctgacacccccagtcttcagaatggccatcagcgctgtcgctgtggcaccagggtgactgccgcctggaggctgagtcctggcttcctgacagctgtggggcccgctctaggctcccttgtcctgatcattcatcacctccaggatgcacagcagctgggccagggggaggagcagggacaggtgtcagccaccctgtgtgtctgcaagtcaggctgggggtgtgggaggacgccaggaatgactgaactttctgatttagagggtgagagcttgcactgatggaatttgggatttaataggaaaagcatagcgttttcctattttgtaggcagggtggctggagtttggaatcatagattcccctgggatgtcactgtggacctcagtcccacccgttaggggcacagatttcagaatccacaccctggggcaaagcaggcatgggaggctccatcagcctggccagggctctctatttgtgcagctgctgcaaggagatgtgcactctgatgggaacagtgctccctcctccttggggggcagtatctagctccctgcagcccctctccctgcaggccctgccctctctgaacctcaccttccccaacccgccccccgcaatcccatctcagctgtaatcccaacactttctcatccattatgggtggactgcttgagcccaggggttcaagactatgctggctggacaatatagcgagttgttgtctctacaaaaagacaaaaattagctgtgcatggtggcatacacctgtagtcccagtcactcaggaggctgaggtgggaggattgcttgagctggggaggctgagttggcagtgagttgagattgtgccactgtatacttcagtgtaggtaacagagcgagaccctgtctcaaaaaataaaagtaaaaaaaaaaaaagaaatatggaatacattattgttaactctaatcaaccatgctatgcaatagtccaccagtaataccagtaatagccaataatgaattatctgaaaaagaatacaatttattcttagctatctactgctaaaatttttaagctatcttttatgatagctgaaacaaaagaagtaaatttaaccaaggaagtaaaagacctttataatgaaaactgtaaaacattgatgaaataaattgaaaaagacacacgcacaaatagaagatattccatgttcatgaattggaagaactgatattgctaaaatgtccttaccacccaaagtggtctacagattcaatgcaatttctgtcaaaacaccaatgatattcttcgaagaagtagaagatcctaaaattagaaaccacaaaaattcctaaaacctgcacaaaacaccctgagttgccaaagcaatcttaaacaaatagaacaaagctagtggcattacacttcctgacaatcaaagcatactgcaaagctatagtaaccaaatcagcatggtcctggcataaaaacaagcacatagatcaatgaaacagaataaaaatcccagaaataaacccatgcatctctagctaactgattttcagccaaggagccacatgcacacaatggggaaaggacagcctcttcaataagtggtgctggggaattggatattcatatgcagaagaatgaacctagaccctatccctcaccatgcacaaaaaattaactcaaaatgtattaaataaagacttaaatgtaagaactgaaactatgaaactactagaagaaaatatagggggaaaatccatgacattggtctaggcaaagagtttttggataaaatctcaacagcataagcaacaaaaccaaatataaacaaacgggatttcatcaaactaaaaagcttttatacagcaaagaaaaaaaaggccagcagagcaaagagacaacctacaaatgggaggagaatatatttgtaaatatatacatatatatttgtaaatatatacatctgataagaagataatatccaaaatatataagaaaattatgtttctgtatagttttatctgactgggatacagaggccacatccacagtcccatcctcaaaggccacttgttcccaaaatgtcaagcacatccctcaatgatccatcatcaacacctatgtctgtaggatgaagggtgaatcatgaagcactaaaaaggaagaaggaagccaatcccaaaacaaaatgatgcagggtctggaaagtccaaagcattttttttttttttttactgcatcttcctcctttcttctccacattcccaatcctcactattgattaacaaaacaaaaaaaactgggacccaccatcttccctactgtcaggagatctagcgagattgtttgagtcttagaccaaactttgccataagccaaatttctggctgactttacaatgatatgagctagcacagtctctttttctgccagtcaacttgtgctcggttttatttgcaaccaaatagaggtggtaaccaaatataggtgaccctaaaattagtcatcaggatgaaatcctaaaatgtgcaacaaactgggttgaattcaggattagtagcaacatctctgttgtgggcttgaaaagggggcacccttttatgcagtagcaaaattgctaaattgttgtttgctgagtctttggactctcatcccggattttctatgaccattcaaacagggctgcaatgaacatctatggttgtttagcttggcacacttctacatttctatatagtaatatctagaagtgcatttgctcaatcacaagatatgcacattttataattgactgctatcgaactaccttaaatagccttaatttgttctcaacattgtttaacagggtctgtttaatgtcctacgtccagcaaggacagtatcacttttcttaatatttttcaaattattggaccttaacaaatacttaatgtgcaattaattgattcctttgtattcccatgccttcttttatatgtttccttatagtacacaaaaccacattattgtttctttacttgtgtcattccaccctggaccattcctatctaaactataacattatgagagagagagagagagaaaacaatatgaaaatataaattgattaatcaaaaaaatttaaataggacaaatcaggaagacacaagagagattttaaaattattcagagaataccacaatagctgtaccaatatattttaaaacttagatgaaacggacaactatctcgataaatgtaaattaccaaaactgactcatgaaaaaatggatattatgaatagagcaataatcagtaaagcaattaaaaagacagttgataatttttatttactgacaacaataacaaaatttcaggtcctgatatttttatggtgaattttaacaaattttcaagctcctcctcaaccaattctcagaaggtttaaaactttaacaagaaaacactttctaacacattttcagaagctgttatagcatgataccaaaaccacacaagaaaattatagaccaatctcacttacaaatatacatgcaaaatcaaacaaaatcttagtgaaccaaattcagaattaataatagcaaacaagcaaaatatgttatcatacgtatggcttatatcaggaatgcaagtatgtttcaacatcagaaaatacttctccacattaacagactaaaggagaaaaacgcttgtttaattatctcaataggtttttagagaattttgaaaattttataaagttatgcgtattctgtaaaattgatgaaatccaaccttgatttatttttaaaaattgcctttcctatagaattataggtaaaggaaacacatgcatcctcacagagctacttcaaggctaagttacttcccataagtaacgtatcctgtaatgtgtgcttggcacatattcaatactaaacaaatatttgcaaatcctcaaaccacttctcgctcaaataacccacctttgtcttttgcctttatgttagggttgattttctcaattgtatcttggagatcctttggtgggtctttcagcaattaccctgaatttgcttttctgtttacaattttaattcctgggaactctttcttgttctctgactgcacccttttcatgagagttcagccatcaatcctccagaaccccaccccccccgcccccccaaaaagcaataaagatgtctaaaagcttccttctgggctttcgaatgatgtttaccccaggcatttgttctattcgttcatcacccattttccctacaacttgcctacacttgatatcagatttttatttattagtcacctatcttcttcattggcccattttcctattttgccactggttgttctcaaatgtgttatgattcctggttgtacagtcaagtggttgataatcttggatatacgataaagatttgctctgtagctgtgtgtaagcctatataaaagcttttgtatttttcttcttaaaaaagacaaaagatggttgggaagatccctccagttcaccagttcgaggctgcagtgagctatgatagcgccgctgctctagcctgtctgtctgtgaaaaacaaggggggcggggggcgggggggaagactggagatgtaaatctcccgcagggccctacccgtatccgcaacaggtctctaacaggaacagcctcaggcctgtgttggaacaaggtaggttacagaaatctggaagccagatctgtaacttcagggtaaggactggctctcagggctgatcccccgggctgggtgtcccagaggcacccgcccccgccccttccccaaggcaggccaggacaccttcactcctctccttaggctccccacccccttctcctccccactgtgcctcctggagtagcggtggcggtgccacaggggagcggggcggggcgggctctgagggcaagggggatgggccccgccggggtcactggcggccaccctggaaactcgacgcaggccggcccttctagtgaatcgtcccagccacagctggcctcccagccgcgcttggggcgcctcggggcgcgaatggtgcaggttggggagactcaccacgcaccgtcgggggtcggtccggttattcctcaccgctcggctccagtgggcgcgcgggcctctcctcctcagttcctgcgctgcagtccctccctcacccttcgcagcttgggaatccaactgtgtcattccgacggagcgccgtgaggacctccgagggtgttagcgccaagtgatctctgtccagcgctctgaatatccaagtaaaggagttcaatgaagggcgggtcaacggaggagaaaccgtgactctctcaagggagcccaaggcctccttgtctaattagtgacgcgccaatggatggaggctcttcccaccatctcttcccagcatccagtgacaccaccgccaagggacgggctcggcggaacctgcaggaaagaagcatcggctgagcctgactgcagcgctgtgaagagacaggggaggggatcagtagttggtcccgcgcccaccccctgtttccgcgaggggcggagttgactggccatgcaggcagagggcgaaatgtgaaattccactactcctaccgtttttccctgacccgatggggcggagtgtcgtcaggctaagttccctggcggtaaggtggggagattgaggcgcacacctgccgaacggtaacgcaggattagctaaggcgagctcaggacagaagcctcccgaggagcaggagggcaaaataataaataaataaataaataataaataactcactccttggtctttatttgcggcaggaattcagaaggtgaaagcggggccttaggatctttctgaccttttgggttttaagcaggaggtgtcagaaatgttaccacagggctagctggcttgtggccagcaagcgttcacaatgccctcgatttttcatccctctctgtgggttctttttttcattgtaaggcagaatttctacgattgctcacccactcagagaacctgagctggtttagaccaggtgagacaggctaggtttaccctggtgatgatgtgttgttgccatggcgatcctgcccagtaccagaggccctgcagattcagatgcttggtgcctgtgcttggctgaggggccaatgggtgaagctgccatctgcgggatgatgactgaagcctctaagtcagaatccgcccaggctgagccttagggcagctccatggagcctcggctggcctgggatagagagtccaccactgtgccagcccccagccactgcctaggtcctgtgctgagagccccttgtccagggaaatggcgtccagtggaaaagggaccacccccttgcccttcactcaaggcaggttggtgacaaccctgaagctaatccgttcctagaggagctgcttctgggtccgagttttctctgcagcagagcagctccctggatgggatctgttcaaagtccgcctttcacgcggaattttccgtccttgcaattttccacctccaccactaggggatcctctctgaccgcctcatgccggctctggcctctgagcaggggtttctcttctgcatgtgcgaccttgcgcatgcctagtggccttttgggacctagagctgctccacaccccgatggggttacagagtgcctcgcctccactccaccccaccagggttccttccctggctgggatgggatttcagaagcgccgaggaacagcccagacaggtgtgggagagtagccaaggcccctgtcccggggtggccaggacagcggtggcctcgcataggacctggctgggctgctgcaatcagtgtcctgccccttggagagcaacagtgaaaacaacaagactatcttcacccaccttaagaaagaacagaaccagtatccccaactctgctgtgtatcccaacccaattccattccccaccccactctcagtagccaatatgcaaaatattagaatactcttactgttattattttcaaccacactctgcatcctgaaaaaccatatatttcgttatgtgcttttaaacttcttgaaaatgaaatactgaggctgggcgcagtggctgacacctgtaatcccagcacttcgggaggcggaggcaggcggatcacgaggtcaggagatcgagaccatcctggctaacacagtgaaaccccatctctactaaaaatacaaaaaattagccgggcgtggtggcgggcgcctgtagtcccagctacttgggaggctgaggcaggagaacggcgtgaacccgggaggtggagcttgcactgagccgagatcgcgccactgcactccagcctgggcgacagcgccagactctgtctccaaaaaaaaaaagaaaaaagaaatactgaattttcaaatacttgctttttttttcggtcaaaattatgttctcaaatttcactcctgtagatgtgcgtggctggctgtagtttttgcatttttattattaggtattctcctgttgcattaatatgccacattttatttctctcatgtttttggtgaccacttggggtgttttttggttttgtatttttgctgtatacatgctgccatggtggacatacctctttatacatatttcctgttgtatgcagacacaattttaggatgtgacatcttcagcttttctattgtgtcgtgtgtcttttccttcgtgctttgtgttatttacatattctggacacagattctttgtcaactgtatgtgctgcacatctctttcccagtttgtgtcttcttcttcttttttttttcttaaaaaaaactttctttatagtgttttttttttctttctttctttgttttgttttgtttttttgagatggagtcttgctctgtcacctaggctgaagtgcactggccgatctcggctcactgcaacctccgtctcctgggttcaagtgattctcctgcctcagcttcccaagtagctgggattacaggtgcctgtcaccacacccagctaatttttgtatttttagtacagatggggtttcaccatgtttgtcaggctggtctcgaactcctgacctcaggtgatccaccctctttggcctcccaaagtgttgggattacaggcgtgagccacagcacctggcctgtgttctttcttaagtagatgttacttttaatataatagaatgtatcatattttgcttttatattagtactttttctatctaattcaaacacatccccaagggtctttgtgtgtagactgaccaatttctcaagaatcatgaatgaatactgcttctctttccccaatttatctgtaatgctacctttattataaagtttctatgcatgtgtagaaatagttcctgatttttcactctgtgccaccagcataccaatagcacgctgtcttaaatattaaatagcagagctttatgagacaacttgatgtgcagtaggcaattgcccccttgttactcttcttcagggttctttgttgtaccacatgaattttagaattggcttgtccagctaaaagacaactgcaaggattttatttggaagttcataattctatacataatttggggaaagtattttcataataccaagtcttcctattaatgaacacagactctctctctctctcccccacccccacctgtttagttatttatatctttatggtctgttagttattgtttattgtctttcaaccaggtttcatgtttttctacatagaggccttgcatgtgaaagtctttcttcctagcttgctattacaaattttttttaattgcactttttgggtacagtggcttgtactgtaatccccgatacctgggaggctgaggcagatggattgcttgagtccagaagttcaagaccagcctgggcaacataatgaggtccctgtctcaaaaagtttgttttaaaaattgcatttgctgttattcaacaaatgtcattgtgtctcatatatggatttttatatctgataaccttgttcaacaatcttttgattctaacaatatatcagattcttttgagttttccatatagacaataatgtcatctgtaaattataattgtttcttctttgttatttcttggaccttttattttatatttttgtcttgctgcaaggcaatatccctctatatattgtggggtcttttttctcataaagtggggatggtgaacacccttgtcttgctctctgattgtataaagcatgctttctgtagcattttgtagacgctcttttttagattgaggtaattcacttttatttctggtttactgagtttttagcataaattcaggctgaatttgagctaaagctttttctggagacatcatttgaaaaattcatatgatttactttctttaagtcaccaaagttatgatttacattgaactgagtttctactgtttaactgtattcttgggagaaaacccacttgtcactgaacaatatctgttttatttactgctgtcttgtgtctaaattttcttttaggattttttgtatatgctcagattagcctgttattctcctttctgtatttttttctggtttgggggtcaaagttataatagcctcacaataagagctaagaaaccagccctaatggaggccggggcaggaggtttggagttcaagaccagtctgggcaaaatagtgagacccccatctctatgaaaaatagaaattagccaggcatggcagtgagtacctgtagtcctaggtacttgggagggtgaggcaggaggattgcttgagcctaggaatttgaggctgcagcgaactatgattgtgccactgtactccagcctggatgacagagcgagaccctgtctcaaaagaaaaaaaaagaagaaataaaaaggaaaagataaaagagctaagcatctgtttccttttttccattttctgggagagtatgtgtaagactgtaattaactgtttcttgaataatgggagaactctgtaaaataatctggctttggtgttacctgtattggaaggatgaaaaataccaattcagtttcattattggttgatagggctactcatgctttttgttttgttttgttttgttttgtttttgagaggaagtctctctgtattgccctgttgtccaggctgagatgcaacgttgttcacaggcctgatcctggctcactacagcttctaacttccgatctcaatagatcctcccgcctcagccttcccagtagctaggactacaagcatgcagcatcacatccagcctcttttcctgcctgacccagttctggtttcctttagttttctaggtgttcatccattttatctaatgtttaatgcatttggcataagggtgctcagtgtcctttcattgtctgttgtctgtaactgttgccattttcattcctatttatgagtactggcgtcttctctcactttttcttaataatcctgctggaactttgctttttaaagaacatcttttgacttgttgattcttttttcatacatattaactattttcttattttttgcctttatatttatttcttttcctgtttgaaacattgctcttttcttactataaaaatgggtaagtagctcatgaattaccacctcttttaaaaatcttttctactgtaagcattttagcagtttacatttgcccacaagtaccacttcagctacaccctatgtgcttttacataaagtcttcatttttggtaagacatattctcaaattttaattatcacttgtttttaaatccatgatgttttatttgaaatgttgtttctaaagatacattttctggttatacttttattcttctaatttagcacagtggccacaaaacatggtctgtgcagtgcatacaatcgatgagtaatttctgagctgtagtatttggcataatatatggcaaaatttcctaagttttccatgtgtgctttaaaaaacttccagtaaaatacataaatctgttagatcaagcttctcacattgttcaaatagtctatatgtttactgattcatttgactgcttgatttatcaattacaggtaggaatgtattcaaatctcctattaaagtgtgacactcaagtggctttttaaagacagagatgccaaaccaatgaatacatgattttccccaaagcctgcacaaattctctaatgaaattttaccatgaaagtttgtttaattaaggcttactaaagcagtatgttgtcttttactttttaaacagagaatatatattttaatacatcgtttaagtttatgattaattatctattactgaggataagaatctttgcctgtgctcattcagcatttgcacttcatttatgatctgccttctcatagcttctgttaatttttatactagagacatttatttgtttgtataaatgttgaaggtttttttttgttgttgttgtttttgagtcagagcctcgctctgtcacccaggctggagtgcagtggcatgatctcggctcactgcagcctccatctcctgggttaaagtgattctcctgcctcagcctccagagtagctgggactacaggcatgtgccaccaagcaaggctaatattttgtatttttagtagagatggggtttcgtcctgttagccagggtggtctcgatctcctgacctcatgatctacctgcctcggcctcccaaagtgctaggattacaggtgtgagccaccgtgcccagctgggttttttatattataaggagatgtaatagatagatagatgtttcaaagatagtcaaatgtttttaaaatttaaaacacttttttacaggttgactttcaccatttaatttcatctatgtgttttgccttagagaaattttaaatgctatgtagatctcatgacttataattatgaagcattttgttttctgttttccacgaaacttagcttaactttgagcatataatagttgtaaaggtaggagagtaacactgaaaaaaggaattgcataaaaatggcacattttctgtagagttgtttatcgcctgaaaataggccccatttcatggaagtaagatgatcaggctcaggtccccagacgaaactcttggcatggtttttggagatagtccagggctcagtactggctctatcatttgctacttctcccaaagtaaccaatatctcatccaccctgagcccatttccatatctctaacatgaggataatagcatctaccttacacaccaagtagagggatcaaatgtaggaactaaatcaaagtaccagcactgaataacctacatcctcccacttcccaaaaggaagagagatgtatcccctgttgacaaacgagaccattttgcaggagagaaaggaaatgccagttcacttgcaatgtaaacatgctctctctttttagggatgtccagggacctgagagagaacccatgcttaccaaagagtttctagttccagacacacaggactcgaagggtgacaagtatggttttcagggtccctgaatccacccagtcctcacagaaactcctaaaagctgtcgattgacagcgttgagttcacagctctggtcctcacatgctgatactgcttgtgatatcgaacccgacaggaccccacatcacaattgatttaccaactacaatataatacctcctgaatctccaaattggctcacccaggaacaaaggcttggggtaaaactggattaggagatataagctctgaattttctgagggtgagacacacaaggattctaagtgacacgccacagagtaacgggtctgtgactggaggacccacagatttgtcttactggagacaccacatgcacacaaactccatccttagctgtggaaacaagggtcttttgctatcttagccgaattctgggagtaatttttggaggggaggagatctttgggattgcctctttcaggccctttacaaaaatacctacttcttaaatggtaaagcttacactaaactgaaaaaattacatccttggctttttatgaagtaggtgttggattgaatcactactggaagaagtatggcatcgcaaattctaagcagtggtcaaaggatggatctgttaaattagaaaaatctctaaatttataaaaagattttagattcctttattctaaacaattgacctatttgtactcatgggacaatcaaatttcaaaggagatatgtaacgatttcatggcttgcattaaaaatccttctgataaaattaaagataaaaaatctgaccccctgccaaaaaaatcttttgaagttcatactgcctgctttcaatattctgtgggattcacaatgaaaggtgccttatattgtggcctagcttcaagtttatgccttcgccaccatggcctgggttcaattcccagtcagggccccagcgcctttggtttaatgtttgcgtggcatttgacttttttacctatttagtattggtgagattacctttggtaaaaaaaagtttaaagagtggaaatcgcaattctttgtgttggctaaaatctgattataagagatctggaaggttttatttttctttttcaaagagctctatggtcagaagtcggcttcatgaaaagctaatatttaattatatgtacatacagtctttctggattttctcttttgcctcctgttttgaaaaatatttggatttgagtgaaactccgttttagaaattaattgcttggtacaatatacccatgtaactaccctgcacatgtaccccctgaatctataataagagttgaaattttgacaaaataaaattagattttgaattaaaacaaataggtgcttggttcctctgctcacttctttttaaaaggaattcctctcccatgtacttcttcttttcccttctttaccttccttttggcatctttggtatcacatgaagggatctagagggaattttaagtgactctgaaattccttgagaaatacacaaaaagatcccactcaccccttttgggggtctcctgttctccttgtggagtccagagtcagggacaggctcctccaggtctgcagctctgctctcttttatttcatcttggctgattgctttggttttgtgagtaccaggcattactttgtactgtgagagacacgtcctttgtgagtgcaacggctgctgggtcactggtgagggctgcagtttggagatggctgagagccgttgcaataaatggttgtgattgcagggggctccttgtttctttgcaagtttagatgagaaaggtgcagtttggacacagtttaaaggctgtgaaaacaccaccaatgaatatgatttcctttggggatggtctgattaaaagtgggctgattgttgctgtgctactagccttgaagacatgtttctacagcattgtgcagtgtggaaaaattgtgtggcttggtcttgtggcatgtcccttcttttagagacctcagattcaatgtgaaattcgggatttttgattttcaaagatctagatgccctgccttccagatgtgcctactcttcacatattttaaaattagatcctataaactgcaaatactttgttggcttctgtgagatcagaggtccagttagaaaaggaagacagtttgttaaaattaaaaactatttatctaatctaactagattggcctccaaatatgactttctgacattcagctggttactctgaaaagatttctaaatctcttgaggctcatctatatgtttccttgcaaagaaaaaaaaaaaaaaaaaaaagcaagcccaagcactagtaagaaaaagatttgcaatgtttcatgaaaggagtagatgagtgaagcatttatttgtagatactgggttggatacctgtgcaaagaagaagaggtcaataataaaaattgccaggggatttcttggaacttaacaagctgaattaaatatagaaatgtcaggaaatcaaggcaggaaatactcacttgtggttaggcagacagggcagggttctgagcttgagatggagcaaacagttgtggtgggtgaagttcacatgctttagagctcagctgtcctagtaaagaagcctaagagtctctaaagctcttatgagaagatggattttttttgcctagattaaaaggttaaagaattgctttaagttggataaaataaagctaaatgtttaagcaagttgtgaaaggtttatgaaaaaattaattaaaatatttttgtgtgtaaacatattgactaaagttgaaggggtataattcagcatttctgtaaattgagcattgaaataaaaacacaatgggtttctcttagagcactaacctgctctttaacaaaaattgtaaagggttatagaaagtctataaaaatgttaccttatggtcaaacattaaaattgggtaaatatgtctatcaggttttattaagaattaggtttaacattaatagtacactaatgtaaaggtgaaatttggcttatttggtacaaaaatcatacaggaagcattgtgaaatataaaatgatttttagctttctttgggctatatttctataaatatgttattgatgagggttccaaagttatgggagactcctataattctgctatatctcagtgtacattatcagtcataattataattgtcatgttaaattattgtgggccacagaggtaacagatttccttgtcaattgtgtctttgactatgactaccctaaaacgttcagtcacccatatacacatgttaccttgttttggccctctttagaaggtaattttataatcagctataaagccctaacaggtgctcttaaatgcaaattttgataactttggagattgtgacatcagaagagaggaaaaatgttcgggacacttggagagctaaaatgttcattgatatcaagcaggacaggaattaactgcatgaagtgaactaataggaggctgaagtgatctttttgactttttgcttaaaacgttgctgatcctttgttttgcttttcagagtcaaggcaaattttcttttgagctattgacagcttttaacgattaatcaaaatatactcctatgaacaccatttggagcattatttgtttctctctacccgatttccccagaatttggaaactatttgtgggtattcttaatttatggcaatatagttatttgcataagtgcaataagaatgtgttttctttggtaacaggacacaatttgaaaaactggttattttaccaaggttttgaccagaatgctgtgctttcctttaaggaatcaaacttgacttgtggagctaataaagcctttggaaaactgaccttatatcctgtgaacacagtccctgtacagggttactgatctgtgggaagaaaagaatgtcacattctgacaggtcaggaatcccaagttatcttgaaacttcaagaggacaggaattcacccaaccatatgtatttgatggtagaaatccatggcaggggctcagctttaaaaagtcttatctcagattccttctataaaacaaagtcccattaaaaccaattttaaaagcctatgtgaaaaataattattcttgctgcacctcgtacaaataaagtggcaaagcataataaagcaaattggtcctgtcgtaatttgtctttagtaaaaacgggaaactggggtcgggtgcagtggctcactcctgtaatcccagcactttgggaggctgaggtgggcagatcatctgaggtcaggagttcaagaccagcctggccaacatggtgaaaccccatctctacaaaaatacaaaaatgagccgggcatgatggcgggtgcctgtaatcccagctactcaaggggctgaggcagggaagcggaggttacagtgagtcaagatcgtgccacttcacgacagcctgggtgacagagcaagactccatctcaacaacaacaacaaaaaagggtaactggagagagggaagttatgtttcaaaaacttttggaaactatagtacacctgtttttaaattctagtctggcattcagtttttattattttctacagtttgggttaaattcgtatttctctggctacaagtctcctaaataatcttttcatttgtttcctttttctttccctttttccccatttttcttaattggaaatcactgaaacctaagctgtgctttcttaaagccctgtgaactgaagactagacaaccgaaacttctgaaggaagtagcagcaacctatttatatgtgttgctgttgcctactattatgttttagcaggtgctgcctctacacccccgaaacagagagtgctactgggaacaaatcgactttttccactccagtgctgcattcggtgccccataacgatgaccccctctcagcaggaagtagccagaaagattacaatgctccatctccctatgattcttgtgataaataaatatacaagcatgatagaaatcatgcgcaaattgacagtggggattgtggcaggccagatttcactaatggaggtccccatcacaactacttcagtactgactgagtggttaagttcagtatcaaaagctgaaagtgccagcgcctttctacaaaggctagaatgtaacaaaagcccaccaagggttttacctaggcctttcctgggccttacagcatgacaaaacaaagaaggaattcttaaccagacctgtttaggattaaacaaatttaattgggggtctgaagaaactcgccaggcctccacaaacaagttcattgggggtctaaaggaaccccccccaaacctctgtgattgagcaggagacaaggtcagggtaattgccccagcacctggactcatttagatttaagtaaatgtactgaggctccagagaaaggtctccaagacttagactagagttacagattaaaagaagttaatcacttatatctttagataaatgcacactgacacgtagacatacatcttagaaaatatataagctctggaaaaccttgtaatttacagttggtctggagatattttctgggccttctctctgtaaccggttccagaaataaaaaactctcttcctccccagtttatctgcatctcgttattgggccgtgagaaatagcagccagaccctgagtttggtctgggaacacactggctgggcttcctgcctggcggtagagcttcactgtcctccttcccagccaaaatgtggcccttgaaggcttcctccccaactgaccggttttgggttctaggtactcagggaacaccgtcttcaaggaggccattttcatactgttcctggtttgatttttctgaaattaggaaatgccccttgaggcatccaggattgtctttatttcccctgaagcttcccctcctgaagaaaaaagttctcaaacaccctcaggactcaaaccccaagttcaccctgtgaaacattcccatttcctaaacccaggcaggctcatggccctcagcctctcagaccccatggaaacctcctcccccacttcacgggttctctccatattgagagcctcccctcctcggcacacaacccagagactcaccccaacatgtgtagcaaatcaccctggaaacaatcatggctgaacgtggtagcccatgcctgtaatcccagcactttgggaggcccaggaggtggatcacctgaggtcgggagttcgagaccagcgaggccaacatggtgaaacctcgactctactaaaaatacaaagttcactgggcattgtggtgtgtacctgtaatctcaactactcaggaggctgaggcaggagaatcacttaaacctgggagacagagattgcagagagccaagatcgcaccattacactccagcctgggcaagaagagtgaaactacatctaaaaaaaaaaaaaaaaaaaggaaaaggaaaagaaaaaaaaaatcatgaggcaacattgcatttaacaatattttatttatcaaaagacacttgtctttctcaggtaagtgaaggtctagagatgaaacgagtcccgatgtaaattgccccatgggcattgctgagatcacaagatcatcactgcagcatgcagcacaatagtaaatttctcaggatggaagttcaacaatccaaaaggtagtattttttttcatgatgctcagtccatcatacgaaataaaaataaattccttttcatgatcatccattcagtagaaaaaatgatagtaaatttgttctcatgaagatttttaccgtaacatataggatttatcgttattattattattctttgttttttgtttttttgaagcggagtctcactctgttacccagtctggagtgcagtcgtgcgatctgggcacactattaacctccacctccagggttcaagcatttctcctgcctcagcttcccgagtagctgggattacaggcatgcgccaccacacccggctaattttcgtatttttactagagatggggtttcaccgcattggtcgagctggatttgagctccggacctcgggtcatccgcccatctcagcctcccaaagtgctgggattacaggcgtgagccaccgcgcccggcctcaatttatcattattcacgcatccacaaactgggttcttatattttgtacgtgattttttccattgaggagagatatctgtgcatattcatgctgctcatatttcatccacaaactcggttcatatttcatccacaaacataattttttccgttgagaagagatacttgtacatatttatgctgttcaaattcacatttcatcattcttttacaagaaatagataatgtattttaaggttttccagtggtattacagatattttactgggtgtatagatagaaattaaaccaaacttctttgttctggccgccagtcatgcatcctgttttcaacatagttcacatacaactggttgtgtaaaaatgaaattattttgtttagtacaatcatcaacagttggttgattagatttttaattatcaagttaatcattgtcattatgcttctcatcgcactcgtcattaattgctgtgggaggaaatttgttatgttccctatgagagggtgtatcacaaattcaaataagaattcaacgacaatggactgtataaaggaaataagcaagtccatggaaaacatatttttttccggaaaggattaaaatatttttaaaaaggaattaaaaaaaaattgggcacggtggcaaatgcctagagtcccagctgctcaggagatggagacagaaggattgcttgagcccaggaataagttggaggctgtagtgaacagtgattccaccactgtactccagccagggcaatagagggaaaccctctttctaaaaagacaaaaagaaacaaaacaaaacaaaaaaacaccacatcaaaaaacccaacaacaaaatgaaaaaccaaataacagcaatacaattggagctattcgatccaaagaagtaaatgaaacataaagcaaataaaagagaaaagctaatacctgtgtcctgcaggactcagtccaagttctgctctgactccctcctggtgagccaccccttaaaaagtcacttggggcggggttactttgacagacagtcttctgtcaaagagggaggcggtaaatagcacttttttttttttaatttaacgcctttccaacaaattagcggctatgttgtctaagagtgcaaatgtcagaggtgggtacaggcagcaagaccctccccacaggggcagcagaaggaggaatgactaagggaacaagactttagtgtgctcaactacacaggacaggaaacagatgctttttacaaaagctggtggacttgaaggcagaatattttcaagttcctgtaactgcgaactatgacctgtagcctgtgagagtgactttctgtggcaaaggagcttttgtgaatgtgaggaagttaattatcttaacagtgggaggttctcccggcttatctagctagaccctcgtgaaatcccaagtgtccttaggaaggggaagcagagagagatttgagtccagaagaggaagaaggtgatgtgaggcccagtaggggaacaaagggcgatggcatgtaaacacttagcccccagaagtgggagagggctggggttcatcacaccagaatccctaacaatcagccttattttaattacccttgaaatggaaggaggccttagagagccagaggcttggaggggcaccctctgctgcatacacagatcccaactgctgtgggctccaaataattgcaccagggaaatcacaaattatcaaaaataaaggatgtaaagcttttaaaaaatattaaaagcccaacaaataaaaaaagttctaaatctataaaattgacctcagtctgtatatttagatgagtcatgtgtatatagcgtttcacttcaaaatatatgataaatctctcattcattggcttaaaaataaacacttcaatcaagtctttatcagaaaaattgaaacgttaactcaattgccttttagttcatgtgactttacaaaacttaaaacaataaagtcagttttaaaaattattagtaaagtaaaagaaaaatatcttcacaatgtagacattttgtccacatgagacatgtgaaatattgccattactaaatatttgcaggtcaaaaactgtttccaaaacattttaaataatcatctggcctgtctgttttagagcattcaattctagctgaggtctggggacatgtgaaaggagccacggcccgactccgtgctgggaagagtcagacattttccacagctctgtcctttgctgtgggctctgcaactcctaccaattaaaattgcttacgtttttgttttatttttactaaagaggggttcctaaaagctaacattatactgagtatatgtaactaaaactactaagaaaacaatttcacaattatacaaatgtgccaagtaaatgaaaaaataaactgtattttaataaaggttataaaaagaaaaacatatagtggtgtgaggactgtctcaggtcttcactgagcaagggatcatgacattctatggcggacagctgaccttggctttctgctcctcttgattatgtctactaagtgacatacttactctttttccacctgtcttgcctctaagggtaacaggttttatgagatccctcctagtgctttgcaggtcagcctccctttgctgcattccaattttactgcctataccctccagctggcttttgatgacaaaagtcctggtcccagccattctcagattctgtcatccccgtgggcactatggagctcagcactatgggaggttccccaaaaatctcgttttctatgaggaatggccaccacctgcatctcagtgatgctagtgacccctttcctactcctgtgctcactggtcctcatgaagatcctggttggtctgtagccccctatttttcctattaaagagaaattacagtaagacccatttgtgtgcaaaatcaattttaggcttattacacttggcctgataatttgcataaaatgcagcaagaattcatcggccatataggctacttttgagttaattttcctgggtttttacctaaaaatatactattttggttagagtcttgtgaaaataaccaatgtgttcaattgttttattttaaaaggctcttactgaacactataaatatgtataagttgaatatacaaactatattgtcataaaatcacaacccaaaatgtggagaacgcagagggaaaggtaaatttgctcgcaaaaacatacttcacccaaataactggaaaaaaaaaaagactttcatgacccttctttaaccagagcagcagctttcaaacaaggtgtttgccttggaaatgccattcacaagccaaacggcccttgagagctgtctgtcaggcactgtagaatctagcagctcctcacagagttagaaatagtttcaggaaagagattccctgcttttagtaactgcactttatattcccagatagcgagattgtatgtaaaccatttttatcttattctggaactcttttgggtactttttttttttttttttaaatgatggagtctggctctgttgctcaggctggggtgtagtggtgcgatttcagggtatgagaaaatgcagctggacctggctctttccaggaagaccctcacagccaaggagtccaaagcctggggttttcatctaattccagtgtgactggggtaggagcagctttggtgctgggtgtgtgtgtgtgtgtgtgtgtgtgtgtgtgtgtctatgcctgtgtctgtttagggtgttaggctcgtggttgtctagatacaaatgtcccagggctcaggagccccagggttatgtcaggggcaccagatgaaggtgtcaacagaagttagggcacaagggacaaaggtgagagcaaggttagattcatttaggtgcaagaaatcatagagggaggagggagaggaagccctcctgctaccaccgaggaagaagcgcagcttaaggcagaaagcctgtccggagaggaagtgagtttgagggcagggctctctgggtaaagtacggtctgggacaccagcctgggggaagggtacagaatgcagagtggcctggcgtggggactaagaacagaggagagcagctttcactgggagggtcagtgttttcagtgtccagcactgagcaaggtgagatttgggcagcttgctgtgaaataaggtcaggctctggcattgtccccattgcgtgtgtgtgtgaggggcactttgggagagtgaactctccacctccatcctctcatacgtccttcaaccgagcttgccagttaccctgattccaaggagatctatttattgttgacaatactggatcctagcagaggctgggtaggagcctgggcacaagcaagtggaggagggggcctgggcctgaaagacctgggaggtttgagagaggacacagcccacagaatggagcagatggggtagagtcggcaagcattcagggctcctagtaagttggacaatggagaccctgaaagatccagtaaaacggggagaacaaacaggtccccaactcacatccttgcagtgcctggagcttcagactccagacaggtggggaaggaaaattgagggatgtgaacatgttggagaatgtcgtgccctgaagaatgaagaaaaggggggtgaggaatgagagcaggaacggcttccagtgcctggtgcccaggagaactcagaaaatgggtgtggtggagaggaatcgaggaaccggaagtggtggaagtgtgcagggcccctccgagatcactgtgactgccaggcgtcctccctggctggagagcttcactgtcctccttcccagccaaaatgtgtcccttgaaagcttcctccccaatggactggttctgggtcctatatatttgaaggggtggcctgcctctccacacctgtgggtatttctagttgggtgggaggagagacagagaaaagaaataagacacagagacaaagtataaagaaacaacagtgggtccaggggaccagcactcagcacaccaagggcctgcaccggcaccggcctctgagtttcctcagtttttattgattattattttcattatttcagcaaaaaggaatgtagtaggagagcagggtgataataaggagaaggtcaatgaaaaacatgtgagcaaaagaatctatatcataattaagttcaagggaaagtactatgcctggacgtgcactcaggccagatttatgtttctctccacccaaacatctcagtggagtaaagaataacaaggcagtattactgcaaacatgtctcacctcccgccacagggcagcttttctcctatctcagagttgaacaaatgtacaattgggttttacaccgagacattcagttctgaggggcaagcaggagacagtggccttcctccatctcgactgcaagaggctttcctcttttactaatccacctcagcacagaccctttatgggtgttgggctgggggacagtcaggtccttctcatcccatgaggccatatttcagactatcacatggggagaaaccttggacaataccccgctttcaagggcagaggtccctgcggctttccacagtgtattgtgcccctggtttattgagactagagaatggcaatgacctttaccaagtatactgcttgtaaatattttgttaacaaggcacatcctgcacagccctaggtcccttaaaccttgatttcatacaacacatgtttttgtgagctccaagttgggtcaaagtggctgggtcaaagtggctggggcaaagctacaaattaacaacatctcagcaaagccattgttcaaagtacaggtctttttcaaaatggagtctcttatgtctttcctttctacatggacacagtgacagtctgatctctctttcctttccctacatatattcatggaccacagtcttcaaggagtccatttcctcactgtttttggtttgatttctctgaaattaggaaatgccccattgaggcacccaggattgtctttacttcccccagagcttccactcctgaggcaggagcttctcaaacaccccccaagactcaacacctaatttcaccctctgaaaccttcccatttcttaaatccaggcagggtcatggtccttagcccctcagatgctgtggagaccttctttccctttcatacattctctcaagattaaaagccacccctcctcagcacacaccccagagactcaccccaacatgcattgcaaatcaccctggaaacagtcataagaccacactcatttaataatattttatttatcaaaagacactctttctcaggtaagtgaagttctggagaggaaaagaggagtcctgatgtaaattgccctgcaggccttgctgagatcacaaggagattgttactgcagcttgtagcacaatagtaaatttcttctctggatggaagttcaacaatccagatcgtagtatattccttttcattatgctcagtccagcaaatgtgatgataacaaattccttttcatgatcatccattcagcagagaaaatgtttgtaaatgtgttttcatgaagatgtttaccataacatacaggatttaccattatcaatgcatccacaaactctgctgttgttttttatacataattttttccatcgagaagtgatagttgtacatattcatgctgttcatatttcaaccacaaactctgctggtttttttatacgtaattttttccattgagaagtgatacttgtacatatttgtgctgttcatatttcatgtttcatcatccttttacaataaataggttatattgtattttaagtttttctaactgtagtgcagaaattgtactgggtgtatacatagatatcaaaccaaatttacttgttctggctgataatgcatcatttatttcatagattatgtatttctttgacacatttcacgtacaactaattgcataaaaatgaattttcttttagtatagacatcagcatgtgcttaattcggaatttaattgttgagttaaacatcgtcattgccttttccgttgttattaattgctctggtgggaattttgttatctcatacataagacagtgtgccacaatatctcttaaaatttcaatggcaataaactttatatttaaaaacagggaatctatggaaaacacatttttttctaaaggattaaaatatttttttaaaataattttctaaaaagttaggcacggtagcaaacgtctagagtcccagctactcaggaggctgagacaggaggattgcttaagcctacgagttgggggctgcagtgaactgtgattgcaccactacattccagccagggcaatagaagttaaccctttttctaaaaaaaaaaaaaaaagaaagaaagaaagaaaaaaagcaacaacaccaaaacctcaccaacaaaatggtaaagaaaaaaaaaacagcaatacaatgtaagctatttgatccaaagaagtcaatgaaatttaaaacaaatgaaagggaaaaagtaatacttgagtcctgcaggactcagtccaagttctgctgtgcctccctcacggtgagccacccctttagaagtcacttgggtcataagttaacccgataggaagtgtcctggccaatgaactagggaggtggtaaatggcaccattttaaatttaaattcacggccttttcaacggatcagtagccatgttgggtaagagtgcaaatgtcagaggtgaaaagaggcagcaggaccctcccctagtgcttgggcaacagaaggtggaatcactaaggggacaagactttagcatgctcaagtacacaggacagaaaacatgctttttacaaaagctggtaaatatgaagagggaacattttcaagttcctgtaaccaagaactaccgcctgtaaccggtgaaagtgactttctatggcaaaagcgtttttgaaaaggtgaggaagttaaatatcttaatgttgggaggttcttctggtttatctggctagaccctaatggaatcccaagtgtccttatggagcggggagcagagagagagatttgagtccagacgaggaagaaggtgatgtgagtctgggtgcgggacagggggagaatgatgctatgtggggatctgggctggggaatgacttagctgcatgagcggagtgacttagactcctgaactagaagaaatctagggctcatcacctcagcagccctaaccatcaaccttatttttattacaggtcttccatcgacggactccctaaaaagccagcggcgtggaggggcgccctctattggacaaatagatcttgactactttcggccctcaaatagcctgactaggcaaataacaaataataataatttttttttaaatcatggaaaatattttaaaaaacaattaaaaagttataaatctataaaatctgcttctgtctgtgtgtctgtatatttagatgtctcatgtgtacataatgtttcactaccaaaatatatgatgaaaccctcattaatcggcttagaaaactaaacacctaaatattttctcagaaaatacaaaaactttaactcaaatcccttttaattcacctgactttaaaaatctttaaaaaataaagcatgctttaaaattattagtaaagtaaaattagaacatcttcagaatttagacatttggtttaaattatacaggtcaaatactgcccttagtaaatattttcaggtcataaacaactcctgtaatcttttaaataattgaattacatgtctgttttagagctttaagttctagctaaagcctggggacaaatgaagggcaccatgccccctctctgtgctggaaagagacattttctacagctctgacccttgcagtaggctttgcaactgctacctatcaaaattgcctacatcctaagtttattattaaaaggagttgcttggagttaacattataatgaatatatgtaactaaaactatttctcatacaaagtatatgaaaaagtagaatgtatttttaataaaaagttataaaaagacatgaacatgtagtttttataaaaaacagtaattttgtctagttttgcagttctaaaaagttatgttaaattcaaaaataaaaaataacaagacaagactcaaggtttaaataagttgtaaaagatttgtaaaaattagttctataaaaattttacaaaaaaaagcattggttaaaatttaaggaattattttgtttttacagaaattaaacattcattaaaaacactctgatacaaggccttaatttgggttcatgtatcagaatagcagggttttcttagaatattaatctattctttaaaagaactatgaatgttatgcaaactttataaaaatcttaccttagagtcaaactgattaaaattccatagattttacgtaaaattttattaaaaattaacttcaacaaaaataaaatttgattttctcctttaaacaaaagttttgcgtaatattaaataataaagcatttttgtttaccttttaaactataaacacacacacacatacacatacaccaacactaaagtcagctgacctcatactgtctttattggatattcttgtttaaaaaactatcttctttggaaaataaagttttttattttaaaccatattttaaattatcattttgactaaatccataacatacagtgatctgtaataattctattttataatatcaagtgttttgaagaactccaggaacagccatgagagaacactgtggtttagtaacactttatttcctcagtttgaaaatagttgtctttcttggggaggccggtttcagcagatgaaaacaagagtcatgatgaaaattacccagcagtggttagtgtgaccataggaacattgtcatcaggtcagcagaaaacatatcagcaaatttttctcatactggcagtgtgtaggggtggatgtttacagttcctgaagccccagtggtcgtgtggtcttttagttttgccatttataggcaacttgtggtaactagctcaattagacacattccttatcacaaggacagagggctttctgtatcctagggttcttgccttggcattccagaagaatcaggtcacacgtggacgtggagaatgagtgcaaggttttattgagtggaagtagctctcagcagatgggggagccagaaaggagattggtttctccctggattggggccgttcagcagccctggctctcctctgactgccccaggcaaaatccacatcgttctataagtcggtgccctgctggtgtgctggtgcctgttgtcatgttcctcttcatgtccagccgcctgtgtgttcctccgctgatgtgctcctctcgacgtcaagcctcctgtgtgtctgactgctagggtcttggggtttttataagcacaggatgggtcttagcaggccaggatgatcttgggaaagacaacattcggtcaggaaaacaaaaatgcctgttgtcatctaggtccgtggggacaagcccaggtgtggagcttttagccagggaccacagcctcctgtatccaacacttcccttcaccttttctatatcattcaaagggatcatgcccttcccatcccagcacttcactttcatgtcatttgccccctctgaagaggtacatctaactgccattagaatatggatgatgaccagtcttagctgcttcctgctgaaagggggcattgttttgggggaaaacggcagtcagattcctcccaggggtctctataataaaagatcgaggtggctactttcaggaggtcctctaatgtactatctggtcccaagtcccatttctgcaacctcctcctgatgtcaggagctgcctgagtaataattttatcctttaggattatctgtccctcgattgaattaggagatagagaggtgtgatttaccaaggcctctcttagcctctccaggaaggcagtgggattttcatcaaatccctggttaattatggacaacttagtataattgagaggcttggtcttagacctacgtaagccctctattatgcacacctgaaagtgtctcctcttccagtcttccatctcattattgggatcccatttagggtccttcactggtgctacttctcttccagttggataatattcgctcccttccctgatgctataggtgatgcaaagctcatccccaaatctctctgctgctggcagagcagcctgcttctcagtgtctatcaggttctgactcaaaagtaacataacgtctctccaggagagttcaaatgttagggtgaaattctggaaagcttctatatatctatcagggtcatctgaacacttgcccagatctcccttaatttgctttaagtcttgtagggaaaagaggacttggaccttactgggcccaaattcactgggcatctgtaggaggggcaagagtgagactgggcttgtttgggatgaagatttctaggaggggccaggtgagaggctgaagctggatacggaggttggggtggacccagaggagcagggcttgagggagctggcacgtcagctgggggtgcgtctgggactcgtgtctttaattccctgggcttgaccctggcagccttccccgagacagcaaacaggagggctggaacaatcctacatgtcagcaaaggtctggattgctttgcaaggtatagaaagcctgcacatttggggcctcagaccatgtgtcctcacatccagagaaaagttctaattgcaggatggtattgaaatgaatggtcccttcctgaagccaagccagtccttcctgtaaaccataatttggccaaacctatgtgcggagggctatgagatgcttttcctctggattctgagggtcaaaacagtcccaatggttcaggatacactcaaggggagtacaagctgggggtggtgaggagaactggctgcccattctgaaagacagggaatagaggtgttcctcatttcccttccttcttttggcaaaaagctcagggtgtgatggggagggaaagcaagcatcttcacttcactttccacctcttacccctgcgccctggcaaccttggcaggtgccggccacaggtacaaatgcggtatgtacccatgaagcagggagaacctggagattaggaattaactgccctcacctatgtttccttttctccctgctgttgaaaaactttgagttccctgggcctttttatcccatgaggcatggcctccttctgtgggatggggttcagtcagcaggaattggtcctgtccatttacattgtgcctgttgcctggctttgaattcctcagacctgctttctctttctagggcctcagcctgaagcttggaattgagtttgggactgaaaaagcatttcagaggctgtttatatccatttagtgcctcaaataagccctgctgaatttgcaattatcagccagcaggggtcactcctctgttaacttccctattagaaacagagcggtggggattctcacttagaaaagaaaaaaagagaaaaacagttaaagaggcaaaaagtggggaatgctgggggaagaaccccttgcttagtgcaagtgggcccctctaatccttataactttcccatccttcccccagttcagaccaggttgaattccttggccatggaaggaaaggttccattgatgcagtgggtgagaagcactctgtagggtcctggctaccatcggttttctcacacccccctcatcccaggcagtggagggagacacttctgcgacattgctccccctgccccttcatggctattgggtgtggcctttgcctgctgcaggcatgcctaggtgctggagctgggagggaaaagggtaaggagaggtgccctggaagccgctcatgcctggggctgtcaaggtggaggcatacatggcacctctaggaaaaattggtctgatttgcacctttggcggctgagccaaatgctcattttacttagtaacattgcctcagcctgtagcaaaactcttaacattataaaggaagagataagatccatttcaaataatgtgtgagagagaaaagagatgaaaggaaaacagagtcttttacctgcaggaaagggagagaagtggcagagttttggaagaaaggcaggcccaacagtttcccattcactcacactcaccttccgagatcccagacgagccaccagttgaaatgggaaaagtttccttgtccccctcacaggaggtggagtgggggtgtggcttgcttctttagtactccgctgctcaaacctctagggaagcatacagactggcaagttgtggggctacaaccccatggcagcatctaggggtagatgtttacagctgctgaagccccagtggacatgtggtaccatgtgctcttttagttttgccatctataggtggctttgtggtaaccagctcaattagacccattccttaacccaaagacagagggctttctgtatcccgcggttgttacctaggtgtaccagaaaaatcaaatcacacgtggtcttggagaatgagtgcaaggttttattgagtggaagtagctctcagcagatgggggagccaaaagggagaatagttttcccctgaagtcgggttattcagcggcccaggctctcctctggctgccccagccaaactctatgtcaatccattggtcggtggcctgccagagtgctggtgcctgttggtggattcctctcagcgtcgagagtttttccctctcaggaaagggagagaagtggcagccacccatgtgttcttgcactgatgtgctcctctcgacgtccaacctcctgtgtgtctgcctgctagggtcccagagtttttttaggcacaggatagggcatggtgggccagggtgatcttgggaaatgcaacatttggtcaggaaaacaaaaatgcctgtcctcatctaggtccaggggcacaagcccaggtttggagccctagccagggaccccggcctcctctacccatcactttccttcaccttttctgtatcattcaaagggaccatgcccttcccttcccagcacttctcttctgtatcaataggtgatgtttttaaaatttcccaactctagtgcaggcatggtactagacatatacatagaaataaaaccacacttattcttctggctggcaagacatagtatttttgccaaattatgtgttgttttgaagcattttatgtacccctggtcatataaaaataaagctattttgttcagtacaaacagcagcattttctggattagaaagttaatcatcttaaaagatcatcacggatttttccattgcactcatcactaattgctttggcaaaaaatttcttatctcacgcatgacaaaatcagccgcagtatctcctagtaatttaatggtgatgatctttataaaggaaataagcacatcaagggaaaacataattttttttaaaaaaagagtaataaaactttttaaaagtcttttttaaaagactgcttttctaaaatagtaaaataaaactccaccaataaaaccaccaacaaaacagaaaagaaaaaataatgatatgatcggagctatttgatgaaagatggtaaattaaatttaaaatgattagaagagaaaaagcaatacctgtctcccgtaggtctcagtccaggttctgctatgcctttctcctggtgagccacctatttaagagtcgcttaaagcatatgttaatccaacaacagcagattaaaaaccaatgcaatctgaactatttgatctaaaaacataaataaaatttaaaacaaataaaagagaaaaagcagtacctgtgtcctgtaggtctcagtccaagatctgctctgactcccttgtggtgagttagccctttagaagtcacttggggtggggcatatgttaattccactaacattggttctggccaatgagtcaggaaggtggtaaatggcaccttttcttcttgctgatttctttcagttcctttggagtctggacattagtcctttgtcagatgcctagtttgtgactactgtttcctatactgtgggttgtgtgtttaccctgctgatatttcttctgccttgcagaagattttcggtttcattaggtcctattgatcttattctatttttatatttttgcgtttgcttttggggcattagtcatgactacttggcctaagccaatgtctagaaaagctttttggatgctatcttgtagcatttttagactttcaggtcttagatggaagtttttatatgctttgttaaagatcaggtgactgaaagtaccgggctttgtttctcggttctctattctgttccattgctctatgtgcctatttttatacttcctgcaccatttattgaataaagtgtcctttccccaattagtgtttttgcatactttgttgaagattagttgtctgtaagcatttggctttatttctgggttctctattctgttccattgctctatgtgcctatttttatacttcctgcaccatttattgaataaagtatcctttccccaattaatgtttttgtgtactttgttgaagattagttgtctgtaagcatttggctttatttctgggttctctattctgttctattgctctatgtgcatattttataccagtatcatgctattttggtgattgtagccttgtagtataatttaaagcctgccttcagatttgttctttttgcaaagtattgctttggatatgcggtcacgtttttggttttgtataaattttaggattcttttttctagttctgggaaggagaatgatgatattttgatgagaattctactgctctgtagatggctttggagagtatggtcactttcacaatattgattctacctattcataagcttataatgtgttcccatttgtttgtgtcaactgtgatttctttcagcactattttgtagttttccttgtaggaaacttacattaacctacttggttaagtatatttctaagtattttacttattaaaaattctcagggaaatgcaaagtaaaactgaggtgggaaattaaagaaaaataaaattaaaaagaaagggaaataagctttcttgtattaagctaacttgtcccagaggcagcaacaggcacagcccagacccaggaaaagtcttgataatattatttattgtattctggagactcttccagcactccttcaatgtagggagaagaaaaacaaattttcctttgttttatggtatgagtttatagattcttgttctctttaactagtaacttcaagtattctgttttatctaagaagtatggcaaaggtcatgagaagcctgagcaggcctgaactacagctctctaggcaccatagtgaagataaaccaatgcaagcctctttagagcaaaacctagataatagacatctgggttgcatagcaacagttatgtgcaatcctgagttatgaacctgttacaatttgattaactgtctttttcctgcctctgtatccctgctttcacaccactgtaagcttgcttcaagctggcccacccccttttgtgaagtgtgtataaaagtcaagtgctgtctttgttccaggccctgtctttggacgtgagtctgctgggcctgagagcactcaataaaagattctcctgttttaacccaaagcctctctctcatcctcctaaatcccacaacaaaaccacaatgagatgctatcttaatcttgctagaagcccataatttaaaagtcagaaaacaatagatgttggcatagatgtggtcaaaagggagcactttgacactgctagtgggaatttaaactagtccgaccactatggtaaacagtatggggattccttaaagaactaaaagtagaccattcattccagcaatcccattactggctatctacccaaaggaaaagaagttattccataaaaaagacacaagaatatggatgtttatagcagccgattcgcaattgcagtgatatgggaccaacttaagtgcccatcaacgaacgagtggataaagcaaatgtggtacaccatggaataatacttgataataaaaaggaacaaaataatgtcctttgcaacaagttggatggaactggaagccattattctaagtgaagtaactgaggaatggcaaatcaaatattgaatgttttcacttttaaatgagagttaagctatgagaatgcaaaggcataagaatgatataatggacttggggactcagggggaaaggttgggagggggatgaggaataaatgatgacatattgggtatattatacactgctcaggagacagatgcctcaaaatctcagaaattaccactaaggaacttttatccacataaccaaaaaccacatatattccacacactattgaaagaaacataaacattattttaaaaaataaagccacttttaaaattagcaaaataaaataaatatgtcttcagagtttagatattggatccaaattagacagatcaaatactgcctttactaaatattttcatgtcattaacaacttctaaaacctttcaaacagttttttgacatgtcttggaaccatccatttctagctaaggcctgggcacctgtgaaatagggccatgcccccccttatactgggaagagtaagatatttcaagactaagatgttttctacagctccatctttttctttaagctctacatcaaggacataattaaaattggttgtctcctaagtggtttactaaaaatgcatacttaagagttaccattataattaatatttgtatctaaagctacttaaaaattttcacacacaaatctgactgaacaagtaaaatatattttaagtcaaagtttataaaaggacatgagaacatagcttttatgaaaaaattagttttgtcaagtttagaggttttcaaatattttaaattcaggaaataaaataacaaaaagacaaaagaaaatggttgaacaacttagaaaaggtttgttaaaattcatcttataaaacaatctacatgtaaaaagtgggctaaaatttgaaagagattatttaggttttccataaattaatccagaaggggtaggaagtcttaagaatgaggaaggacaggaggaaggggaggtcatcctgacactgcagaggcagaagtgcagctgaaggtatgaaggctaagaggggaggggagtttgagtgctgctgcctggctgtcagagcagaggagggtcctgggcaccagacttgaggaagggatgaaaatgctgggcagacctgtagtgggcccttgagatggcagatagtggtttccagagagagggccattgttttccagtgcccagcactgagcagagagagttttgggcagtgtaaaaaaaaaaagagaacttacctctttctcgttttagaaaaagaacagtctaagaatatcagcagggaaactctcagtgcttcaaggggttaaacgcccttttggctttcttgtgttggtttcatcatagaggaggagaaacttcttggaagtgttcctaaaaacacaacacgtctgcttctcctttcaaaaaaggaagtgctaaaacacgaacactctagatccaaatattaatacggatgtctaaatgcttccgttttccaaggggcagaaagctaaaggttgtaacctattcatttcagtcaaagttggtgaaagggaagcaaaggaactgggtggggcttggaaggatgacgaagctcaagctcattggccagcaacctctctcctgggggcgggaggggtgagcatacgtcattgctttggcttctataaaatgaggaggactcaccgagtgtgaagagtccttctggtgattgcagctgagagcacactcacgacgttctgcaaggattctctgattatgattctgaagggaaaagcgatggaatggacagcagagattgtaattttctttatcttgaattacggaagaaagtatctaggacagaaatccacgacaagtccttggaaccagcagatctcttcgttcacggagacgttgacgtattctctattgaagaagattcttaccttcttactggacaaggttttgtcagttctgcgtgactggattgtccgggagactctgaggaaactgatgtcacatgtttttccaaagaagatgtttctggaaccaacaactgtgattgtggtttgaggacttctgagagttccagtacaggaaataagcagaacatcagctggaggctaaacggatccagacttcactcttcacttcccttcctattcagtctattgtgcctgctgactgagaagcttggctggtatgtgagcaaataaacggaactattcagaaggagatgttgacatattctgtattgaagaagatccttatcttctcacctgacaaggttttgtcagttctgtgtgactggattgtccggaagactctgaggaaactgatgtcacatgtttttccaaagaagatgtttctggaaccaacaactgtgattgtggtttgaggacgcctgggagttccggtatgcgaaataagcagaacatcagctggcggctgaagggatgcagcctccactcttcacttcccttgccattccatctattgtgtctgcctgactgagaagcttggctggtatgtgaggaaataaacggaattataaacaaggagattgtttctcatctacttcattctgttgtggcttttctattttggggttcagggtgtgtgacaaggaccaaggagatgaaaggtttcatgatggagaaagcccaggcaatcagattgaagagctatccacagggaatcttggctgctgaggggctgcaccctgcaacggactgaccatatgacagaaaagggttttaaaggctcaacttctggactgagaacccagagtaatttgggaacctcctctgtgaggagatatgaaagctgggaatcatgacatccctaggaatggaaggcacatttcctgatggaaggggtgctttggaaaacaggagcagagtagacacagcagccttgtggatacgggtgggcagcatgcatgggtgatgtgaacgtggagtgtttgtgatcgaaactcaaaatgtctgacaaagtgaaaacctagaaaccacaatgaggaggaagagtttgtgagggcaatcactctccccatgtgtgaaaatcgggggctcttaaaatctcatctggagaggtgcagtctaccaaactctgggactttagcctccccttttaaaaaaccgtgcatcaataccaacgtccgaaaccacagaaataacacctggcttgcatggagacaaggacaaaaagccgtcatgatgagttgttctgctcacttgctgcctctgttcagtgcacaggatattgtccacccactagcaggctactgcaagagaagtgtgcaatatgttccctatgtgccatatatgtgccatatggcccatatgacaactgagtcagaaaatatctgatgccctcagagttacactccacctggagcttgcccccagccatccaggacctaggctccctaccctgtccaattttctggtgttttgggggcttcattctctaaggtgtgcccactctttactcaaaccaaaacacccacatattcctgcccatgaacaaccaatcaaccacttctcagttccacatcctgctgttgggtctctagtggtgacactgtaactcccaggtcatagtggtgacactataacacctagctaaattgatgccttgtctctaggaggccatgggctcctgcaggtctcatctgactctctgtagccttccctgacaatgctcacaatacccaagccagagccacattgacagcaagctgctctcatcttacctttgccagacctggccactggaaaaggctgaccctcatcctgcaatgcctatacctccaacctttgtctcaagctggtgtcctggagggacttctaagcagaaaacagattcagactcccatcctctcctgaatggcctcatatccaattctcagaccctcagccttcattgtaaggacacttcatccatgcccttgagtattctgtctgcactgtgtattctgcaatagattctcctccctctgcgaccctcaactccttccgcagactttttgttttcttgatcatctaccatagtcttccactgggacactgccaagcccattctggagagtgagttgtgcaagtacactgccccccatctacctttcgggaggtgtatacacccttctttctcccaggtctggaggctttctattttcatcctgaggcatctccacctgctcttggattcttcaaattgacaaccaccagttaacaagaactatgtgtcaccaaatagccaaacaatggcaattacaaaaataaaattaatagctgtaacccccattagcaaggatacacaaatcaaatcagggatagtgggtgaggaagtctgcctaacattcaaggaaggattctgaagtgatacaaaatcattgcctttgctatctttagaatggacactttcagccaggcacagttgctcagcctgtaatcccagcactctgagagccccagttgggtggatcacttgaggccagcagcttgagaccaccctgggcaatgtgcagaaaccccaactctactaaaaatacaaaaatagccagttattgtggcacatgcctgtaatcccaactccttgggaggctgaggcacaagaatcacttgaatctgggagccagagtttgtaatgagcgaagatcatgccactgcactctagcctaggcattagagtgataatctgtctgtggaaaataaaaacattcctcttcaaagttttcttctttaaatcataaatgttggaattaatatatcctctttgaaactcactttcttcaagcttctttatttgatggtagtaaatctttgttaagctttatgaggcaagagtaatggaagaagcatattatatatatttatactctaacctcagtgcttgttctagcaagctcaggcatgcgtgaatgtgcccaggcatgttccagcccataccttatatcctttccttattgggaaatgctgttactcctataagcattcttgtaagcaacttcctctttttctttgtctccactatctttacctattgaggacagttttaggttcttagccagttggatgtagcatagactgtgaggtccaaccccagccaatggagatagcacacagcagtagcgacctcatgcttaacagataaatattcctgtctccctttgtttggggtgctctcagctgatgagcaacaccctttctaaagaaattaaagttgtcttgctgagaaaacttttggtctaaatgctgattcttccttgcagcactgaagaagaagcaattatttccaacactttctcatacacaaaaaaagaagaaggtggaagaaaactttcttgtgcaccctatccctcactcagaaagacaacagaaggctcctagtggcaagccctagaggattcatttcttttgggaaccctcttggctgggatactaggactcaggtcaaactcagcattttcagtgtgtgggaagtgtgcttgggtttcactgttacttccaataatgtgatttggtccttggggttcaccaaattttggtatggagtggtgaaccctgttaagtttaagtgtctataaaattaacaaagcaaaataaccattctgccccatggttcagagaccaaatattgtgtaggaaatgctttagcgagagaaacagagaagaataaaaaatgtcctcaagcgctgcattatttcttgttatcgtccagatcttagaggaaaggctttcattttccctcattcagtatgatattagctgtgcatctgtcatttatggcttttattatgttggggtatgttccctgtgtatgtagttttttcagggtttttgttatgaagtgatgttgaactttatcaaacgtttttcagtttcagttgaaacgatcatatgctttttgtccttcattctcttgatatgatgcatcatgttgatgatttccatatggtgcactgtccttgcatcctgggcatgaattccacttgatcatgacaaatgaatttttaatgcattcttgaattccgtttgctggtattttgttgaggatttttgcatcaatattcatcagagatattggcctgcagtttctttttttttcttttttctttgttttgttgtttgtttgtttgtttgttttgatgtgtctatgtctggttttggtatctgggtagtagtgttccatccccttttattttttagaataatttgaataagactggtgttggttctttaaatatttggtagaattccgaagtgaagtcattgggccccgggcttttctttagtggaaggctgtttattatggcttcaatctcgttacttattattggtctattcatgttttgaatttgttccttatttaatcttggtaggctgtgtgtatctaggaatttgtccatttcttttagattttcaaatttattggcacataattgcccattgtagcctctaatcgtcatttgagttcctgcagtaccaattataatgtctccttcttcatttttgattgtatttatttggatcctgcccctttttttcttacttaggctgcctaataatttcttaattttgttgaactttttcttttgtttgtctcgctctgccaccaggctggagtgtagtggtgtgatcttggctcactggaacctccgtctcccaggttcaagcaattctcctgcctcaccctcccaaatagctgggactacaggcaagtgccaccactcccagctaatttttgtatttttagtagacacgggttttcaccatgttggccaggatggtctcgatctcttgacttcataatccacctgcctcagcctcccaaagtgctgggattacaggcatgagccactgcgcccagcctaattttgtttaaattttcaagaaatcaacttcttctttcattgatttctgtattttttatttccattttatttatttaaactctaagctttattctatcttcttctcattttagctttggtatgcttattgcctctctagctctttaatgtgcattgttagattgtttatttgaagttcttcctctctacaccataagacgtaagcatgtcctcattatgtcataagatgtaaccacttacagctataaacttccttcttagttctgcttttgctgtatctcataggctttgttatgttgtgtttccattatcaattgtgtcagaaatttttcaatatttttcttaatttcttcattgagcaactgatcatttgggagcatatttttaaacttccatgtacttacatagtttccaaaatacctcttgtgatcaatttctagttttattccactatggttcaagaagatgcttgatattatttcaattttttttcacattttaagatgtgttttgtgacctaacatatggtctactttttttttttattaaactttaagttgtggggtacatgtgtagaccgtgcagttttgttacataggtatacacgtgccatggtggtttgctgctcccattaacctgtcatctacattaggtacttctcataatgctatccctcccctaacctccaccctctgacaggacctggtgtgtgatgttcccctccctgtgtccatgtgatctatttttgagaatgatccatgtggattagaatgctgtggaaaagactttggattcctaatatccagggagggagacgatgatattactttcaatatcacacgggtgtacacactctctgtgacattgttcctaatatccagtggaagagaggatgatataacacccagggagggagaggatgatattactcttaatattgcagggtgtgtacccatgcctatgatattgttcctaatatcaggagggggagaggatgatattactcagaatatggcagggggtgtacacacactctgtgacatggttcttaatatacaggggagaatgggacaatattactctcaatatcgcagggggcgtacaaccctgtgatttgttcctaatatacaaaaggggacagtatgatattgttcctaaaatcgcagaaggtgtacaacgccctgtgatattgttcctaatatccagggcgggagaggatgatattacccccaatatcacagggggtgtgcactttccctgttacattgttcctatgatccgagtggggggaaatgacattagtcccaatatcgcaggatgtgtacactactcccccatgatattgttcctaatatcaagggggagagaggaggatattactcccaatatcgcaagggaggtacatcctccatgcaatattgttcgtaatattcaggaggagagaggaagatattactctcaatatcgcagaaagtggacacccaccctgtgatgttcttcataatatccagggaagcagacgattatatgactttcaatatcgctgggagtgtacatcccttttgggatattgtttctaatatccaggaagggagaggattatattacttccagtattgcagccagtgtacacatttcttgtgatattgttcctaatatccagaaagggaaaggatgatattactcccaatattgcaggtggtgtacacccccctctgatattgttccttacatcaaggaaaagaaagaagaatattactcccaatatcgaagagagtgtacacccctcctgtgatattgtatttaatatccatggggaaagaggatgttgttactcccaatatcgcagggggtttacacccacactgtgatattgttcctaaaatccagtgaaggagaaaataatattgctcccaatattgcagggtgtatacaggccctcccccgttatattgctcctaatatccagcggtggagaggatattactttcaatttttgcagggagtgtgtaccccctctctgatatttttctaatatcaaggatgggaaaggatgccattactcccaatatcgcaggaggtgtacatgccctgtgatattgttcctaatatccagggaggtagaggatgatattactttcaatattgcaggggctgtacaccctctatgatgttgttattaatatttaggttgggagaaaatgatatttttcctaatatcctgggaaggaaaggatgatattactgtaaatattccagggagtgtacaccttcctaatattctaatattgttcctaatatccaggggtgggagaggattatattactcccaatatcgcagtgggtgtacacccctcctgtgatgttgtttctaatatccaagcgaggagaaaatgatatcactctcaataccgcagggggtgtacaccttccccatcatatcgttcctaatattcagagggaaagaagatgatgttactttcaatatcgcaggggttgtacacaacccctgtgatatttctcctaatatccaggaagaaagaggatgatattgctcccattatagcagacggtatacgcctccctgtaacattgtttctaatatcaagactgggagaggatgatatcacttccagtatcgcaaggggtgtacacctcccccgtgatattgttactaatatccagggggaagaggataatattactttcaatattgcaggggctgtacacccccgtgatattgttgttaatatttaggttgggagaaaatgatattagtccaaatatcgcagagagtgtacacacttccgataatattgttcttaatatccatgggggagacgatgatattacacccaatatcgcagggggtgtagtctccccttgtgatattgtccctaatattcagggaagtaaacgatgatgttagtgtgaatattccagggagtgtacaccccctttgtgatattgtcctaatatccgcaggagagaagataatattactcccaatatcgcagggggtgaacacaccccctgtgatattgtttctaatatccaagcgaggagaaaataatattactcccaatgtctcaggggatatacaccttccctatgatattgtttctaatattcaggtggaaaacgggtgatattactcctaatatccaggaagaaaggggattatgttactccccttatagcagggggtatacacctcccctgtaatattgttcctaatatcaaggctgggatatacgtggggggaaggatgatattactcccaatatcacaggggttataaaaccttctgtgatattgctcctaataaccatggcggaagaagatgatattactcctaatattgcaggaggtgtacactcccccattatgttgttcctagtatgcagaaaaggagaggatgacattattgccaatatcgcagggtgtgtacaccacccatgatattgttcctaatatttagagggacagaggatgatattactcccaatatcgcagggggtgtacacgcatcccctgtgatattgttcttgaaatcgaggggaaagagaattatatttctctaaatattgcagagggtgtacaccgccccctgtgatattgttcctaatagccgggggcggggggagataattaaattactttcaatatctcagagagtgtacatcccccttgtgacattgttcctaatatccagagcaaaagagaatgatattcctcccagtatcgcaggaagtgtacatttaacctgtaatattgtttctaatatccagggggaagagaatagtaatactcccaatatcgtaggggttgtacaccttttctgtgatattgttgcaaatatttagaagagagagagaatattactcgcaatatcacagggaatgtatacttcccctgtgatattgttctaatatctagaaaaagagaggataatattactcctaatattgcagggggtgtacacccccacttgtgatattgttcctaatataaaggaaggtcgaaaaacaaacggggagcccagggggaaggaaggcaggcgaggaagaggcagcgccggggcgccggagggagcagccgggccgcggaagcgcgagcacgagaccggtcgcggtcgcagtcgcatttttgccgttgtcgcggccgccgccgccgaggcttacccggggatgtctgagcccgcgcctcgcggcccccaagctccacgctgcgcccgctgtcccggcctctaagggccgccacgtccctgcggcgcgcgcaggcagaaagcggcttcgtgccggcggagggggcccgggcgggccgggaaaggctgccccaggccccgcgcctaccccatcaccgcggccggcgccgggccgggaggatgagcggtgtggggctctgaagcatggagggggttttgtacaagtggaccaactatctcacaggttggcagcctcgttggtttgttttagataatggaatcttatcctattatgattcacaagatgatgtttgcaaagggagcaaaggaagcataaagatggcagtttgtgaaattaaaggtgacagctttggaggggaccacccttgattggatacataaattctgttcattcagcagacaacacaagaatggaattaatcattcctggagagcagcatttctacatgaaggcagtgaacgcagctgaaagacagaggtggctggtcgctctggggagctccaaagcatgtttgactgatacaaggactaaaaacgaaaaagaaagaagtgaaaccagtgaatcgctgaaaaccaaaatgtctgaacttcgcctctactgtgacctcttaatgcagcaagttcatacgatacaggaatttgttcaccacgatgagaatcattcatctcctagtgcagagaacatcaatgaagcctcttctctgcttagtgccacgtgtaacacgttcatcacaacgcttgaggaatgtgtgaagatagccaatgccaggtttaaacctgagatgtttcaacggcaccatccggatcccttagtttctcctgtgtcaccttctcctgttcaaatgaggaagcgttctgtcagccaccctggttcttgcaccagggaggagtagccactgtataaaagaaccagtatctgcacttcaccgactctcccagcgacgccgaagaacctactcagatacagattcttgtagtgatattcctcttgaagacccagatagacctgttcactgttcaaaaaatacacttaatggagatttggcatcagcaaccattcctgaagaaagcagacttatggccaaaaaacaatctgaatcagaagatactcttccatccttctcttcctgaagaaactgtagtgtccaactttctctaagtattgctatgcaaaagctgctgtaattgaactattgttatagggagtagttttttcccttaggactctgcactttatagaatattgtaaaacagacaaacaagaaaacaaaccacatacttttgaagcgtgttttatctttatatagtttgtttgcaagagtattttcctaataacttcacagtatgaatgtgcatcttttttttctttttttaacaaatgatggtgtaacattttgacatccataaggacaaatgtagatatttttctaaaaaaccgtgaggggactgacagcttggtcagggtgtattgtagcttataaacatgaaatcttacaaggtttcagtttgacagaagtgtgatatatgtaacttgtgccatggaccaaatggtcactttaccacagctaaaaatgagttatgatagcagcttgatggtgattgcattgtattcctttaatcaaaaaggaaacgcaatattctaagtatctttagcccaaataccatgacatattgagcatctttaaataaccagactgtattgtccttcatatgtgaagttgacactactgatttgtcaataccaaattttgggttaaagtgtttaatttttatttatttattttcttgttgcctcaaaagatgattgcattctaacttttgtgacctaccaaatttaagatgtgtatacattgttctttacgttgttctagaaaagagattttaatgctgtagtgacttagctcacttacatcagagaaataaacaactttcaatggaaaaaaatatatataaaggaaggaagaggatgatattacttctcatatagaaggggttgtacaccccccttgtgatattgttcctaatattcagggagggagaggattatattactcccaatatagcagggagtgtacacccccccccccgtgataatgttcctaatattcagggaagcagaggatgatattactttcaatatcacagggggtgtgctgtccccctgttatattgttcttaatattcaggggggagaggatattattatgcccgatatcacaggagaagtacaccccacaagtgatattgttcctaatatccaggggtaaagaggatgatatcgcaggtggtgtacacccctccccgtgatattgtttctaatataaagaaggagagagcatgatattactcccaatatcgctggaggtctacaccccccttgtgatactgttcctaatatccaggaagggaaacaatgatattgctgtgaatattccagggggtgtacacccctttgtaatattgttcctcatatccagggggtagagaggatgatattactcccaatatcgcagggggtgcacggccccactgtgatattgtttttcatatccaggaggggagaggatgacattactctcaatatggcagggggcgaacaccccctgtgatattgtgctagttaggttgggagaaaatgatattactcccaatatcgcagggggtgtacaccgctcctgtgatattgttcctaatatccatgacgggagaggatattactcccaatatcgcagggggtgtacctctcccctgtgggattgttcacagtatccaaaagggaagaggatgatgttactcccaatatcacagggagtgtacaccaccattgtgatattgttcctaatagccagggaagaaaacgatgatattattgtgaatattacagggggtgtacacaccccctgtgatatggtttttaatatacaggttggaaaaggatgatattactcccaatatcacaaaaggtgtacacacccccccatgatattgttcttaatacttcggtggggagaaaatgatattagtctccatatcacaggggtgtgaactcctccggtgatattgtttttaatatcaagaggggaggagatgatattgctttcaatatcgctgggggtgtacatccctcctgtgatattgttccttatatccaggcgaggggaaaataatattactcccaatagtacacaccccatgtggtattgttcctaatactcagggggaaagaagataatattactttcaatatcacagggtttgtacacctttcctgtggtatagttttcaatatccagggggaaggtacatgatattactcccattgcagcaaggggtgtacacacctcctgtgatattgttcctaatatccagaagtggtgaggatgatattactcccagggggtgtacaccccacctatgatattgtttctaatatccaggggaaaagagtgtgatattatgcccaatatcgcagagggtgtacacttatcctgggatattgtttctagtatttggggagggaggagaggatgctattattctcaatatcgcagaaattgtacacccccgctgtgatattcttcataataatcagggaaaaagaggatgatattactaccaatattgcagggggttacacttcccctttggtagtgttcctaatatccaggaagaaagaggatgatattaatcccattttccaggaagtgtacacccaccgtgtcatgttgttcctaatatccagcagggaagaggatgatattactcccaatatcggagagggtgtacacttcccctgttatattgtttctaatacccagggggaagaaggatgacattactgccaatatcacagggtgtgtaccccaccctgctattgttcctaatattcaaaaggaaagatgaaaatattactcccaatatctcagggtgtgtacacctctcctgtgatatcgttcctaatatccacaggaagagagaatattactctcaatattgcaggggggtgtacacccccctgtgatattgttccaaatattcgggcggggagaggatgatattagtcccaatatcgcagggggtgtgcaccaacctgtgatattgttcctaatatccatgcgggggaggacgatatcactctcaatgtcgcaggaagtgtacacctctcttgttatatttttcttaatatccaggagggaaaagatgatattactgccaatatcgcagggtgtgtccaccccccttttatattgttcctaatatccaatggaaaagaggatgacattgctctccatatcccagaaggtgtacaacgcccctgtaatattgttcctaatattttgggggaagagaggatgatataacttataatatcacaggaggtgtacaccacccctatgtattgttcctaatatcctttaagggagaggatgatattactcccaatatctcaggtggtgcctattccccctgtgatattgtttttaatatccaggggaagagagtatgatattacgcccaatatcgcagggggcatacaccctctctgagatattgttcataatatatagagggagagaggatgatattacttccaatatcagaggtggggtacaccccccggttatattattcttgatatccaggaggggagaggttgatattactggatatatagcagggagtgttcacatcttctgtgatactgttcctaatatccagaaaagtagaggatgatattactcccaatatcgcagaacgtgtacacctccctgtgatattgatcctaacattcaaaggggagaggatgatattactcaaaacatcacagggcatgtacactcccctgtgatattgttcctagtatccagaagggagcaagataatattactttcaatatcgcagggggtgtacacccctctttggtatgtttcctaatatccagaaggaaagagggtgctattactttccatattgcaaggggtgtacacccccctgtggtatggttcataatatccagggagggaaagggtgctattattccccatatcgcgaggcatgtacaccctgctgcggtacggttcctaatatccagggggaaagaggatgctattacttcccatatcgcggggtgtgtacacccccgtgtggtatgttttgtaatctccgggaacgaagagggtgttattacccctcatatcgctggaaatgtacactcccctgtggtacggttcacaatatccaggggattgagggtgctattactccccatatcgcggggggagtgcacctccctgtggtatggttcgaaatatccagggtaagagagggtgctattattccccattttgcaggaggcgtacacccctctatggtatgttttgtaatatcccaggtaaggggtgctattgagagaagagagcaaaagaccccccccatattgttctgtattattttatactcagtacctgttttaagaagaaacaaggaagcgaaaccaaaggcaggcagcccggcgccaggcaccagatccaaaaccagacccgaaaccaggcctgggccttcctgaccttagcctgaaagttaaaattcaacccatgacctagcaactgatgttatccatagattccagacattgtatggaaggacattgtgaaatttcttgttctgttctgtttcactctgagtactggtgcatgcagcccttgtcacatacccactagattgctcaatcaatcatggccctttcatgtaaaaaccttagtgttgtgagcccttaaaaaggacagaaattgtgcactcaacaagcttggattttgatactctagtctgctgatgcttccagctgattaaaagccacttccttcactacctcggtgtctgtgggattttgtccgcggctcctcctgctacactgtgactccccttatagagaggggtgtacacccccctttggttcctaatatccagcgggggagtaggtgctattactccccatattgcggggagtgtacacccccttgtagtacggatcgtaaaatcaaggagggagagaaggtgtaattatccccatatcacagggagtgtacacccctttgtggtatagtttgtaatatccacgacgggagagaatgctattactccccatatcgtggagggtgtacaccgccctgtagtatggttcgtaatatccggaaggggagaggttgctattactccccatatggtgggaagtgtacacccccatgtgatatggttcataatatccaggggggtagaggatgatattacccacaatatcatagaaggtgcacacccttttgtgatattgtccataaaatccagaaggggagaggatgatattacttccaatatcacagggggtgtgtagccccatatgatattgtttgtaatatcaaggtagggagaggatgctattccttacaatagctcaaggggtgtaaccttcttgtgatattgtttgtaatatccagaaggggagaagataatttttttattttaaaagtaaactttaatgtcaaaaatgcaaacttgagaagggcagaaagatcaaacagaaggctgccacttcacaattggagggttgcacagtggccgggcagaggcgctcctcactccccagacggtgaggcagccgggcagaggtgctcctcacttccgagatgttgcaggagccgggcagaggtgctcctcacttcccagaacagggggctgccgggcagaggtgctcctcactgcccagacggtttgcaggcctggcagaggcactcctcacttcccaaacggagcagcggcaagccagaggcgctccacacttcccagatggtggggcagccgggcagaggcgatcctcacttctcagagggtagggcggcccagcagaggcgctcctcacttcccacatggtggggcggcaggctagaggcgatcctcacttcccagacggtggtgtggccatgcagaggtgctcctcacttcccagatggtgtggccgccgagctgaggcactcctcacttccctgacagtggggcggctgggcagaggcgctcctcacttcccagacacttggactccgggcagagactctcctcatttcccagatggtggggctgccgggcagaggcgctcctcacttcccagacggttcagaggccgggcagaggcgctctggggagaggataatgttactcccaatatcgcagggggtgcacactccctgtgatattgttccgaatatccagagggggaaaggatgatatagctcccaaaatcgtggggagtgtacacccccctgtgatcttgtttgtaataccaagaagaaaagagaatgctattatttccaatatagcagggggagtacaaccccctgtgatattgttcgtaatatctagggggagagaaaattatattagtcttaatatctcaggggacgttcatccccctgtaatattgttggtaatattcagaatggagaagatgatattgttcttaaaatacaggaaaaaatatgataatattacttccaatatcgaagggggtgtacactctcctgtgatattgttcccaatatccagaatgaaagaggatgctattactcccaatatcccagggagtgtacacccctttgccatattgttcataatatccaggggaagacaggataacattactcccaatatcaccgggggtgtccacccactagtgatatttattgttcatcatatccagaaaaggagaggatgatattactcccaatattgcaggtggtgtacggtccctgtgatattctttgaaatatctagaaaaggagaggatgatatcactccgagtatcacagggggtgtacacccccctgtgatattgttcgtaatatccaggggagaaaaggatgatataattgccaatatttcaggggatgtgcacctccctgtgatattgtttgtaatatccaggggtggagaggatgatattactcaaaataacgtaaacatcctgtgtgtacatcccctgtgatattgtttataatatccaggggggtagaagatgacattacccccaatatcacagagtgtacacacccctgggatactgttcataatatccaggcgggaaagaatgaactacttccaatatcgcaggatatgtacacccccctgtgatatatttcctaatatttatgtgggtaaggatattacccccaatatcacagaaggtgtacatcctctttgtgatattattcctaacatccaggaaaggagagaatgatattactcccagtatcgcagggggtgtacaccacccctgtgatattgttgctaatatccagggggagaggataatattactcccaaaatcacaggggacgtacactcctcctgagatattgttcctaatattcatggggaaaagaatgctactactccaaatacagcagagggtgtacaccatccccgtgatattgttttttatatccaaagggtgaaaggctgatattactcccaatatcgcagggggtgtacaggccccccatgatatcattcttaatatccagggaggcaaagaatgatgttactcccaatattgcaggctgtatacaccccccgtgatattgttcctaatatccagagtaagagaggatgacattgctcccaatattgcaggggttgcacgcacgccctgtgataatattactcccaatatcaacagtgggtgtacactcctcctgtgatattgtttgttatatctaagaaagaagaggatgatattactgtcaatatcacagaaggtgtacagccccttgtgatgttgtttctaatatccagcggtgagaggatggtattactcgcaatattgtagggggtgtccaacggccctgtgatattgtttctcatattcaaaaaggaaaagaataatataactccaaatatcgcagggtgtgtacacttccctgtgatattgatcctaatatccaggaagagagaggatgatattaatcccaatatcacagggggtgtacatcgcttctgtgatattcttcctaatatccagggggggaggggatgctattactcttaaaatcgcagggaacttacactcccactatgatatttttcctaatatccaggaagggagaaaatgatattactcctaatatcacatatcacaatgggtgtacatctccccgtgatattgtttctaatatcaaggatgggagaaaattatattactctcaatatcgcagggggtgtgcacacctcctgtgatattgttcctagtatccagcggaggagatgatattactttaaatattgtagaaggtgtacaacccccctttgatattgttcctaatatccagggggaaaggagatgatattactcctaatatcgcaggggctgtacaaccctatgtgatattgtttcttctaatatccaggggtggagaagataatattactcctaaaatcgaaggggacatacactccccctgtgatatttttcctaatatccagaaggaaagaggatgatattactcctaatattacaagaaatgtatacctgtcctgtgatattgttcctaatatccagaggggtaaatgattatattactcccaatatcgcaggggtgtacaccttccctgagatattgtttctaatatgcagtggaggagaggatggtattactcccaacatcacaggagatgtaaactccccttgtgatattcttcctaatgttcaggacgaaggagggtaatattactcactgtattgcagcagggggtgtagagccccctgtgatattgtttttaatattcaaggttggagaaaataatattccttccaatatcgcatggggtgtacacccttctttttatatagtttctaatatctggggggagaggatgatattactcccaatatcgcagggggattacacccccactgtgatattgtttttaatatccagggtgggagaggataatattactccaaatatcccagggctatacaccctccgtgtgatattgtttctaatatccagaggaagagaagatgatattactcccaatgtcacagggtgtgtacaggccttctttgatattgttcttaatatccatgagggagaggatgatattactcccaatatcgcaaagactgtacaccctttctgtgatattgcttccaatatccagggagggagaggatattacactcaggatcacagggggtgtacaccccaacctgtgatattgtttctaatatctagggaaaatgagggtgatattactatcaatatcacaggaggtgtacactcccttatgatattgttcctaatatccaggagaatgacaggataatattactcccaatatcgcgggtggtgtctccccccactccgtgatattgttcctaatacccagagggggagagaatcatattactcccaatatcgcaggggatgtacacctacatccggcggagtagaagataatattactcacaatatcgcaagaagtgttcaccttccctgttatattgttgctaatatccagggagtgagaagatgatattactttcaatactgagcgtgtacactacccctgtgatattgtttctcatatccagtagaggagaaaatcatgttactcccaatattgcaggggtgaacacctcctttgtgatatttttcctaatatcaggaaagggagagtatgatattacccttaatattgacaggggtgtacacccccctttgatattgttccaatatccaggggggcagaggataatattattcccaatatcgcagagggtgtacaccccccgtgatattgttcctaatatccagagaaataaaaaatagtattatttccaatatcacagggcgtacattttccctgtaattttgttcctaatatctggggggtggggtggcaggataatattactctcaatattggagagggtgtacacccccctgtgatattgttcctaatattcagggtgggagagaatgatgttactcccaatatctcaggagtcgtatacacccccttgtgatattttttctaatatccaggaggcagaggatgatattgctcccaatatcgcagggggtatacacccgagctgtgatattgtttctaatatgcaatatgggggaaggatgattttactttcaatatcgcagggaatgtacactttccttgtgattttgttcctaatatccaggggtggagaagatgctattactatattactcctcatatcgcaggcggtgtacaactccctgtgatatggttcagaatatccagagtgaaaaaggagggtgacattactcccaatatcgggggggtgtacacccctttgtgatgtggttggtaatatccaggggggcagatgagggtgatatcactccccatatcgtggaaggcgtccacttttttgtgatgtggttctttatatcccgaggggagaaggtgatattactccccatatcgcgaagggcatacacccccctgtgatatagctcataatattccggagagtggaggaagatactatgccctatatcgcgggtggcctacaaccccctatggtttggcttataatatccaggggggagagggtaatattgctccccatattgtggagacgtacagccccctgtgatatggtttgtaatatctttggggggcgagggtgatattactccccatatcgcggggagcatacacccccgtgatctggttcatagtatctcaaaggaagaagttgatgtgtacaacttaagggaaaaagttgaagtgaagtgtacacacgccctgtgacgtggttcataatatccaggcgggggagaggagagtgatatttactccccatatcgcgggtgttgtaaactcccctgtgatatagttcataatatccaggggagagaggagggtgatattgctcctcatatcgcgaagggtgtacaaccccctgtgatatggttcataatatccagaagggtagaggacgatgatattactccacatatcttgggaggtgtgatatggttcgtaatatccagcgatgagagaatgatattactccccatatcgcaaaaggtgtgatagggtttgtaatatcctgagggggagagggtgatattaatccctatattgcagaaggactacaccctcccatgacatggtttgtaatatcccagggggtagagtgtgatattactttccatatcacagggggtgtgatatgattcgtaatattcgaagggggagagggtgacactactctccatatcacggggtgtgtgatatggttcttaatatcccaggggttagaggttgatattaccccctttttggggggtgtgtacaccccctgtgatatggttcgtaatatcccgggggagacagggtgacattattccccatatcgaggggatcgtacaccccctgtggtgtggttcataatatccctagggggagatggtgatattactccccatatcagggggcgtgcactcttctgtggtataattagtaatatccagggggcagaggtcgatattcgtttccatatcatgaagggagtacacttccctgtgatatggttcctaatatccaggggggagagggtgatattattccccatattgcggggggacatacaacccctgtgatatggttcataataaccagaaaagaagagggtgatattaatccccgtattgcagagggcatacaccccccctgtgatatggtttgtaatatctaggggaggaaaaggtgatattactttccatattgctgggtgcagacacccctttatgatatggttcataatatccaagttggagagggtgatattacttcccatatcatgggaggtatacccttccctgtgatatggttcgtaatatccagaaggggagagattgatattactccccatattgtggggggcgtacaccttcctgtgatacggtttgtaatatctaggggatatagtgggtgatattactcaccatatcacgggggttgtaacatggtttgtaatatccaggggaggagagggtaatgttactccccatatctcggggcatgtacaccctcctgtgacatggttcgtaatatccaggtcgggagagggtgatattactcctcatattgccgggggtgtgttatggttcataatatcctggggaaggaggctgctatcactctccacatcttgggggatgtacactctcctgtgatatggttcataatatccagggtgggtgagggtaatattactccccatatcgcgggaagtgtacatacccctgtaatattgtttgtaatagaagagagggtgatattactccccacatcgcgggtggtgcccacccccctgtgatatggtttggaatatccagggggatgaggagggtgatattactccccatatctcggtgggagtacatccctctttgatcaagttcataatatccaaaaggaaacaggagagtgatattactccccatatcgccgggggtgtacacgggagggggagtacacccccggcgatatggtctgtaatatccagggaaggagaggagggtgatattactcaccatatcgcaggtggtctacatttacctgtgaaacagtttgtaatatccagggggggaaatgagaatgattttttttttttgagtctcactgtgtcacccaggttggagtgcagtggcacgatcttggctcactgcaacccccgcctcctggactcaagcaattctcctctcccagcctcctgaatagctgggactacaggcgcaccccacaacgtctggctaatttttgtatttttattagagacggggtttcaccatattggccaggctgatctcgaactcctgaccctgtgatccatccgcctcggcctccaaaagtgctgagattacagatgtgagccaccacgcatggcccaaggagaacgatattactccccatatcccagggggtgtatatccccctgtgatatggttcagaatatccggaaggaaagacagggatattacttcccatatcgcaaggggtgtgacatggttcgtaatatcccatgggggagagggtaatattactcttcgtattgtgaagggcatacactcccctgtgatacagttcataatattccggggagtagaggaagatattatgctccatatcgcgggtggcataagccccctgtggtttggttcataatatccagggaggagagggtaatattactccccatattgtggggacgtacaccctcctgtgatatggtttgtaatatcccagaggggagagagtgatattactccccatattgcagggacatacacccccctgtgatatggttcaaaatgtcttttttttttgaaggactggttctttatttcaaaaagacacttgtcaatattcattatcaaaacagttgcactattgatttctctttctcccaatcggccccaagtagaccacatcaaaggagagtacatattaagccaataagctgtaggatgtacacctaacagacctcctagaaaccttaccagaaaatggggacagggtagggaaagaaactttaaaagatcaacaaactgccagcccacggactgcaggggctgtcacagccagatggggtggccagggtgccacaaacccaaagaagcaaagtttcaaaataatataaaatttaaaaagttttgtacataagctattcaagatttctccagcactgactgatacaaagcacaatgagatggcacttgtagagacagcagcttcaaactcagaaaagggtaatgagatgagtttcacatggctaaatcagtggcaaaaacacaatcttctttctttctttctttctttcaaggaggcaagaaaagcaattaagtgctcacctcaacataaggggaacatgatccattctgtaagcagttgggagggggtagagatggaacaaaattttggtctcagaggtcttgccatcttaatttggtcacttctaatgaaaaaaataaaaaatagaaataacattatccaaaggtatcttaaagctgaaaacttgaacagcacattttttgttgttgttgtttggctaactcctcctggaaccacctttctggcttagctagtactttgtacagagcaatgaggcttcccatagtggagtctccctgggctctgtttggctctcagcaaggcaggcctataccttttcctctcctccatggagagaggaatatgcattaaggtgaaaaatcaccttccaaaagtgagaaagggattcgatcgctgcttcagggctgtggtattatatggaatgttttacaaaaggttgctacaaaacaacaaaagaggtaattacaaaatgtgtacatcacaacatactttttaaagacattatgcattgtgctcacattcccttaaatgttgtttccaaaggtgctcagcctctagcccagctggaatctccgggaagaggcggacagtttggtgaaaaagacacagggaaggagcgggcggcggaaggagggggcggcgaaaggagaaagcagccttccagttaaagatcagccctcaattaaaggtcagcttcgggcaggctggcctcaggcggagtctggttcagagggaggagcagcagcagggtgagactgaggcgttctacatctcattcaggtcaagcagagtctggtccagcatcctttgtgtacagaggtgctcccctttggtgcatttcagtttatcttccaagtcatcaattgtcttttccagcttggctaccgatctctcagcaaactcagcatgggtctccgcctcctttattttatcagtaagaatcttgatctcttcctcatatttgtcttctttttgagagtacttttcttcagcagcactcagacacttcaggttctggtccatcagtctaatctgctcatccatctctcggcaaagggattctgccagctcagctcgttcctctgtgcgttccaagtctccttcaatgatcaccaacttacgagccacctcttcatacttcctatctgcctcttctgcaatgtgcttagcttctctgagttggatttcctggagttccatcttttcttcatcttttaaggcccggttttcaataaccttcttacctctctcactctcatcagcagctttttccgcttcttccagcttttgcagggcagtagccaggtgctcctgagcacggtccagctcctcttcaaccagctggatcccacgttcaaggaggccacctcagcctcagcctgttcccgggcccacctttctccctcaacttctcgctggaggcgctcagctcgctcctctgcatcatctgcctgctgctgcagaacctggatcttgcgcttcaccgcctcgatggtggtgatcccagccatggtgcccacccagctactgctagagctccggttcctgcctcctccgatcggcgttgcagcctcctctcacccttacttccgcctcggttcaaaatatcttaagggaaggagttgatattactccccacatcacgggaagtttacatcccctggtgatatggtttgtaatatcccagggtggatagggtgatattactctccatatcgcgaaggagtactcccccctgtgatatggttcataatatccttggggggagagtgtgatattactccccatatcgcgagggccatatactcctttgtgacatggttcgaaatatcccggtgggggagggggtagagggtaatattactccccatacagcgaagagcatacgcccttctgtggcaaggttagtaatacttcagggaaaagagtgcaatattacttttcatattgcagggaacatacactcccctgtgacatggttcgtaatatcccgggggctgagagggtgatatttctccccatatcaccgggggcctacacctgggtgtgatatggctcataatatacagggagggagagggtgatattactccacataccgagtgaggggttacacaccctcgtgacatgttcgaaataccccaaggaggagacaatgatattactttccctgtcgcgggggctacaccctcccagtgatatggttcacaatatcccggggtggagagggtgatattactccctatatcaccggggggtgtacacttccctgggaaatggtttacagtatccccggggggagagggtactattactccccatatcacgttacatatcagggtacacccccacgtgatatggtttgtaacatcccaggaggaagaaaatgatattactccccatatcgcggtggcatacacccctccccgttaaatggttcataatatcttggggtggagagggtgatattactccccatatcacgtggggcatacaccccactatgatatggttcataatatcccggaggggagagggagatattactctccatgtcgcggggggcatatacacccctgtgatatggtttgtgatatcccgggggcggagagggagatattactctccatatcgtggggtcgtacacttttctgtgatatgattcgtaatatccagacggggagagggtgatattacttcccatattgcgggggcgtacacccctctgtgatatggttcataatatcccgaagaaaagagggtgatattactcctcatatcgcggggaacacacaccaccctgtgatatggtttgtaatattcagcgggggagagagtaatattactccctgtatctcggatggcgtacactcccctgtgatatggttcataatatccagaagaaaagagggtgatattactccccatattccagggaatgtacaccaccctttgaatatggttcgtaatatccaggaggggagagggtaatattgctcccaatatcgaaggaggtgttatacggttagtaatatccagagaaggagagggtgacattactccccacatcgtggtgggtgtgcacccacctgtgatatggttcataatattcaggttaagagaggtgatattgctttccatatcgccaagggtgtacactcccgtgaaatacagttcgtaatatccaaaaggggagagggtgatattactcccatatcgtggggggtgtacacccctctgtgatatggttcataatatccagggtggaataaggtggtattactccctgtatctcggggcatgtacatcgcctgtgatatgattcataatatccagaagaagagagggtgatattaatctccatattgctgggggtgtacaaccccctgttgtatggtttgttacactgagttggggagagggttacattactctcaatatcgagtggggcatacacacttatgtgatatggttcataatatcccagggaggagagggtgatattactccccatatcgcgggaggcatacaccccaatgtgatatggtttgtaatatctacatttttttttttgagacgaagtctcgctcttgtcccccaggctggagtatgatggccggatctcggctcactgcaacctcagcctcccgggttcaagcgattctcctgccttggtcccccaagaagttgggattacaggcgcacaccaccacgcccggctactttttgtatttttagtagagaaggggtttcaccatgttggccaggctggtctagaactcctgacctcagatgatccacctgcctcggcctcccaaagtgctgggattacaggcgtgagccactgcacctggcctggtttgtaatatctatgaagggggaaggtgatattactttccatatcacgggaggcgtacaccacgatgtgatatggtttgtaatatccagggggtatactgggtgatattactccccatatcgcggggagtgtatacccttttgtgatatggttcctaatattaagctgaggagaaggtaatattactccccatatcgcaggggtttttatatggttcataatattcaggaagagagagggtgacattactctccatatcacggggtgtgtactcccccatgtgatatggtttgtaatatccagggaaggagaggttaatattactccccatatcgcagggggtgtacacctctctgtggtttgtaatatccaaagggaagaggatgatattatcttcaatatcttggggggatacagtccccagtgatattgttcataatatccagagggggaggggatgatattactcccaatattgcaggtggtgtacaaccccctgtgatattctttataatatagagggggatgatgatattactcccaatatagtaaacaacctgtgtgtacaccccctgtgatattgtttataatatccaagggtggaaaggatgatattactcctcatatcgcagggggtgtatacccctctgtgacattgttcctaatattcaggggaggagaagatgatactactcctcatatcacaggggatgtacacccccctgtgatacttttggtaatatccaggggaggagaaaattatattattccccatgtcacagagggtgtacaccccgctgtgatagtgttcataatatccaggtgaaaagaggatgatattactccgaatatctcaggaagtgtacacccttctgtgatattgttcataatatccaaaggtggagaggaggatactactccccatatcgcagtgggtgtacacccccctgtgatatggttcataatatccaatgtaggagaggatgatattactttccatatcgcggagagtgtacatccccctgttatattgtttgtaatattcagggagaaagaggatactactactccccatatcacacggggtgtatattcccctgtgatatggttcctgatatccaagagatattataatcctctcttggattatgctacctctcatatcgcatggggtgtacacacactttgtgatatcgtttgtcatatccaaggagggagaggattatattaatcccaagatcacggggggtgtacaccctcctgtgatattgtttgtaatattaaggggggagaggataatattactcccaatataattaacaccctgtgtgtactcctccttgtaatattgttcataatatccaatgggggagacgatgatattactttcaatatcgcagaggatgtacatccctttgtaacaatgtttgtaatataaaaggcaagagaggatgatactacttccaaaattgcaggacatgtacaccccccggtgatattgttcctaatatccagtggggaagaggatgatagtagtcccaatatcgcaaagggtgtacacaccccctgggatattgttcctaatataaaaggaggagaggatgctattattcccaatatcacagaaggtgtaaaatcccctgtgatattgttcgtaatattcaggaggggagaggattatattactcccaatatcacagggtgtgtacacagggaggggcaagggccagaagcgggcgggaatccccatgtttgggcggacccagtttctaatggccagcatttgccaatcaaagcttaccagagaactctaaaagccagggctttcctgctagacaagactcatttctggaactgctttaaaaagaaacaaaacttcccaaggaccccttttcctctctgtctgcctaaaataatgttttaaaaactcctaaagcagctgaattcagcccccttcctgggggaatgtatagacggaactcccacctttcccggcatcccaaggccagagtatgtgaaactcctgggtctctatgtgtgtctgagcggctgctctgccaacactccacacagccctgtgtcctggacccaaggcccttatgacctgagctcaagaggggatctcctgatccatgggttgcaaagatccatgggagaagcatggtttctggggcggggtcacacgctcagtcactgtttccctcggatgccggagatggttcctttggctctctgccaatacagggtgaatcatcatccatccctcttttctttgttctcccgggtcaagttgtttgcctagtcagtcccaatgtgagaacctgaatatttcagttgacgcgctgacttcaaaatccccgggcttcgggaggcggagcttgcagtgagccgagatcccgccactgcactccagcctgggcgacagagcgagactccgtctcaaaaaaaaaaaaaaaaaaaaaaaaaaaaaagtccccgggcttttcttttcactcagtggaaggcagctgcttctaattggccatcttggcccgcccccaccacgtgaccttctgtaaaatgcctccactctccaggaacgctctcattatataactttgcctgaaaccaacagcacgctcattgcacatatcatgggctcatttatttcacttataaagaacctggccaaggaagagatagtgcctaaagtggccagtattctgaccgatatgttagaaaaatggtgtgccgaccaattcatgacatgtgtcccaaaactagcaacggaaattgtattcgccgtgttgaggtctctaatccagatgatgctcatctatgtactggaaaaggcagagtcctttcctgacaagctgctgaaactcttcagaaacatctcatatttcctgaagaagatgatgtctggacaagcagcacaggtcgttcagatttaactttctattcatatatccagcacgatattcgcacaattgtcacgaaaccttaccagttgatgagtcctgcacatttcctttaatttcaggaggaagagggtaatccggatgagttttctgacctactctgctgctgtgattaaacaaccaccaggaaattttgacgacactgttctcctgagctcctccctttcctccgggaacaaaacaattgaatttacaaaaataaagtgttatttgactggagtgaggtctcatgtctgcttatgcggtggctcgctgctcagaacagggtgagtctctgggttgtgtgctgaggaggggaggctctcaatctggagaaaacccactgcaggggacacctccatggggtctgagggactgaggatgaggagccggactgggtctagggaaggaggaggtttcagagggtgaaattctggcactaaagcctgggggtgtttgggaacttcctccttccgaagaagtttcagggagggataaagacaaaccctgggctccttgaggggcccttactaatttgagaggactctatcgggaaggagagtgacaatggcctccttgaggactgaggcccctgaataaatgaggcccagatacagtccatgggggatgagaccttcaagggtcacattttggttgggacagaggaaaagtgcagctctgcagccgcagaggaaaacccggcagtgtgaaagcgaccttggaggggccctgtgcgctctgaatgcgtctgagcccccatcccctgtccccgcctctctttctggattcttccagctcggctgtctccgccatcttctgagcgctccaccctgacttattcaagtttcccttctgccttccaagtactccaaaatctttcagatctgtgtccctacccctgtttttagcatgtgttggggctccaggtccctgaaggtttctggcctgaaatccacctccccagcggagtggactgcgttctagagactccacactccgcgaggttcccaggcccctgagggacaaccgagtggcctgcgcacttcagggctccacactcggcaaggtctttcaagcccttggggtccccttcttagttttttccacctttctgggctgcagtcactccataaatgctgggatctgatccccacccccactctcgtttcctcaattctgcgggctacacgctctggcaaggtcctccgggccctggatcccctccctctccctatgcccacgctcctagtcagcccttctggggtccactattttcaggaactaaccgttctcatggagccttgctaaccggaaagctgtgtggaagaaaggctttgaggatagaggtggagatttggctcttccatagtgccactcacccaccccaccatgctgccactgccagacccggacccctgtttcagaacaagtgaccagattcgctcctggacagccctggacactggccttttctctgaaaactactcaccctttctctagtccccacttcatgccagcctcataccctcttccttcccccacgctggcttccgggatcctcctctgctcagacaacctcttctgtgtcccacccccgtttttagaatgctttggggcaccaggttgggggaaggtttctggcctgatatccatctctttccaaactcccttcttcccttgaaaggcttcttgccttcagccccacttctggctccgaggtttcaggacaccctcctcttcatcctcattcttttgaccaccagctttttaggaattcgaacgtccctctcatcttcgtgaatcctgtccaggcatttgttgaccccttcatctgatacccctgacctcacattgccaaaagtctacccctacccagtacactggaattagacaaaatcccaggagttttacctcaactctgagtgtgcccacaggagctctccctgaagccacgtccttttaagcagggtctagggttcctcccttgtcttaatgaactctttgtcacacggaggacgttatggagcccttatgatctttcactgcctttctgcccagcgttttgtctttccatggacatttataatattttccatggacattttgttctctcaatgtccacccctaatttccaacatcccaaagattctcatgtgtttcctgaaagccatttacaggaatggctgtgcccagacccccttccccaggatcctccttcacacctggtaggtgcctctcctagagagatttgcactcagttgtcgtgcagtcacatggcccagatggttgttaatcacccccttcctggcaacagctagcagccagggaatcactggcacagaaacctcagggtgaccaagatgaggccacctctgtgctgaaggctgtgctccagagcctgcttgggatcaggcttaagcaggtcttcagccagacctgatgttacctggtttccttgagctgccctgcctgagctatcgggagcactccctcaatgcacatcttgattccctatctcatgctctgcttctagaaaccatgagctatcaattgctactggcaatggtcctgggaagtcaaccctaagtatggattctggggttggatgactccccacaggacttcagtgagcaacaatcactgctggcagttggaggacagagtcgctagggcatgtgaccactgtgaaaccaccgatgtttcacctggggtaattttggatgaactacggtagaagcactgaaggtacattgcttttggtttggaagattgtaggtaaataatagcgatatgaatgtggaattggatggctgcaaacgagtgccattgatgcattgaaagaggaaaagtcaggctgtcacctgtcactcagcaatttaaagtgtgagagttgggactagatgtggtggctcacatctataatccagagattcgggggaagcttgaagaggtaggatcttttgagtccaggagttccagaccagcctggacaccagagcaagacctcatctctacaacaaaattttcttaaaaattagatgggcttggtggcacgcacctgtacttgtagatctagctaatggggagcatgagataaaaaaatcacctgagtcagggacttaggggttacaatgaggtatgattgtgccagtgcacacactcccacctggccaacagagtgagattctgcttccaaaaaaataagaaataaatcaggtttgagagttggaaagcatcatcttctcctagagccaaaggacatgtacaactgagacccaggaacaaagcttcatcacaaagagaccatcatcagtggagccgggagatgcattccccctcaccctgccttgaggaggcagtggagtcatctgtctgggatcctttctgacccagccctatttgtttgtctctttggcttctttggatttgtatattttagctgttataacactgtaaaacaaacagagtgatttttttgagttgtgtgaatgatgctagctccatagtcaccctgagagtgatgggaacttttgaatttgtggcaagttggagggtagtgtaagtgacctgagattgccaaattggggctagcactggatgtgaggttaggctagtggaaaaatatgcccagaaccagaggagtgtgggctcactgcaggtggttaggctcagatccaaattgtacagatggatagctttggggtaaagaataacatagttgagaagtgcatgtgttagtctgttcatgcactgctataaagaattacctgagactgggtaattatttataaaactcaggtttaattgggtcatggttccacaggctgtacaaaaagtatgatgctggccatcagctcaacttctggggaggccccagaatagttagagtcatggcaaaaagtacaagggaagcaggctcatcttccacggccagagctggagcaagtggtaggagaggtgatacacactttcaaacaagtaggtcttttgagaactccatcaccggacagcacctatgggatggtgctaaattattcatgaaatatccgcctccataatccactcaactgtcaccagcgcagccagccccacctccaacagtggggattacaattccatatgaggtgtgggtggggacacagctccaacctcaatcagtgggcatcctggattgggtctactatagaaggagaaccaggagctgactatgatcttgaaccctacccatgatggccgggcggggtgactcatgcctgtaaccccagcactttgggaggctgaggtgggtggatcgcctgaagtcaggagttagagaccagcctggccaacatggtgaaaacctgtctctactaaaaatacaaaaaattagaccggcgttgtgctggatgcctgtaatcacaccactacgctccagcatgggaaaaaataccaaaacttcgtctcaaaaaaaaaaaaaaaaaaaaaaaaaaaaagactgcccatgaccactgcaccagtgagagggacaccagcatcactgagatgcaagggctggacattcttcataggtcagagctcaaagcaggggacactgatacagagatgggctccatccatagcaccaaagtggtgagaggatgtgggaatggcagaggccagcactttgccatcaatgcaagggggtataaggaggtgacaccagtgccagagtacatcacggggggactgccctacaatatctaggacttacctcttagagcgtgtttcattagcgacaacagatataaatggcagacaggtgtgtccctgcattaacaggaaatagaaatcatcaagaggaacagaaggcagatgtcagcagccccttagaaagtcatcatccttcatacagttaaaatctgagacagttctcacacgagaaggcctaactcaaaaagaggctgggttctcatgaggcaggtttatgcaaaaccaaggaaggtgtacaagtttggaattctccagtttcccttggaaaagacctacagtcatttgcttaggtaactgagcactgaacaaaggtgagtattgttgtcttttagaagctcttggccaagaaggccttgttggcataaaacccatggtttggaaacatcaccatgacccctgttagagtaatggcctaagggtgggggtcaggaaattgatgtattccttgccaacttctgcctctaagtgagtgaactctgtttgtgaacctctctcctctgtggttatgttcctaggctctcatgtataatcaggagtcatagacttagaaacaggaaaaatacttacagtgtttttgtggcctgtgagctatgacttataattttaggaaaaaaacaattgcaaatggaaagcctaagtctatcaatgctcatccaagacaacataatcaataaaaaccaatatcaaatctcaaggcaaattatttcctgtatatagatggcagagatgagcaccaccatcaaaaactcaaggaccagtgctgtgggtccagtcatctgtttcatggaattcaccagtctggtatcttcaaaatccagaaggatgatggcagatggcaggaaagtaatgcaaacgtcatcaggtgtgaccccactgtagcagctgtgatggatgttttctctcaccatagcaataaataacacaacctcggtcacactgtatgcattgttggtctgcaaaatccatgttttgcaaaactcttcaggaaggtggatctgtaatattggcattgacatgagaacaacagcagtatttattcacaatctcaagctctctgtcttcccgtctctctcattagccatccaagtagtcctgaggaaccaagcccatcagaacattctgcaacataatacacagctccattctccattcaaattttgttgttgttgttgttgttgatgagacaacatcttactccatcagccaggctgacgtacagtggggctatctgggctgactgtagtcttgagcttccaggctcaaggcatcctctcacctcagcctcctaagtggcttgaactacagacacacagcgacatgctgggctagtttttgtatattttgtagagacgtgctctcaccatgttattcaggctggactcaaactcctgagcgtaagtgatccaagcaccttggcctcaaagtgctgagattacaagcctgagccactgcacccagcccaatctccattctactgataacaatgtcattaccaggtctgatggacaggaaatggtaaggtttctgaaaacctaaggatcacacagcgagttccaaaggctgaaagtgcatacctgtcgacactgataccaatgacatccaatggtgagaatgacattccttgtagtcctagctctgctcataacaaatctatactgaagtgtaagagtttgatggtcatggggattttccatgtctctgcctttcagcgatgtgccatatctgtgaagtgttcagaaatgcaacagcctgaggcatgctgggcatatcctctaataaaaaggaaaatgccattttatggtcctgtatttctacaagttggaacacatgggcctgtgatccagatgggggaaatgggaatattcccactcattcaccttcatccacgaagcccatttgaaagctttgggcttcccatccttgtagattttagtgttgtgggctgggtgcagtggctttcacctgtactgccaacactttgggaggcctagacaggtgaatccactgaggccaaaagttcgagaccagcctggccaagatggtgaaaccccgtccctactaaaaatacaaaaattagcaaggtattggggccagcacctgtaatcccagctgctcgggaggctgaggctggagaatcgcttgaacccaaaaggcagagactgcagtgacccgatcctgcctttgcactccacctgggcaagcagaacaaaacttctgtcttgaaaaaaaaaacaaaaaacgaacaaaaaagatgttagagttctgggtttagaggtctataccccagaaagagaatggtttcaacaagggacaaagaagttgctttaaacgttgacttgccatttcttttcagtgtgtttgttctcttgcgtcaagagaccaccagaaaagtggtgcaattactctcctgtcaagaatcattgactatcatctgcaagagggtcagatcctggtatataattagggcagaaatacttagtctgagaagggtatgacatccagaggccctattaatgatgtccttttctccatgcctgactctgaccccatgtgctggactgcccctgtgtggatggcctcatggcctgctcggactctgaggtcccaccccaagtggcacctccatggagggctctactcttgtatgggctctgacactcacactgagacactctcccatggacacctcttcacccacttggggtctgaaactgggctactccatccctccctaacctggaacagagagctttcactgctattacacaagtcatagaggctaactcctcatttttccaagctaattattgaaacattagtcctgggttgataagacaagataagttaacttttcataaatttgcttatcaagttttgaataaattcaaataaattcaccttccccacacaccttagttgtcgacatcacacgcgcacccatactcacagggtgagcacgaaggcttcactgtcagtggagaaagtggcaaaacccttctgtgcctcatcctggtctagacctggccctcatcctttcccactcttcccctcactcccttggattcatccacactggcctcctgcctgctgctccacctccctgcgaagctcacccctgcctcagggcctttgcacgtgcagtggcttcaagccatatcctcttcacccagatctcccagatctcctgaatgatcttcttttatcattcaggtctcagcttgcatgtaatcttctcagtgaggattacccaaaccacatagttcattcattcattcaaatattcattcaatggcatattgacaaagcagctacttcatgccaggccttgggccaggtgttatggatatggcaacaaacaaaacaagagttttctgctctcaaatttttacccacttaaaggagatatcatacatcatctgtaaataaatacatcatctgtaaataatgatgtaaataaatacatcatctgtaaatctgtaaataatgatgtaaataaatacatcatctgtaaataaataaagtataataaaagaaaatagtaggtttttttggttggaggtgaccgtgaagtttgcaaataccatcttacaacacattattttattttatttcatttcatttttaattttattattattatactttaagttttagggtacatgtgcacaacgtgcagatttgttacatatgtatacatgtgtgaagttggtgtgctgcacccattaactcgtcatttagcattaggtatatctcctaatgctatccttcccccctcccccaccccacaacagtccccggtgtgtgatgttccccttcctgtgtccatgtgttctcattgttcagttcccccctatgagtgagaacatgcggtatttggttttttgtccttgtgatagtttgctgagaatgatggtttccagcttcatccatgtccctacaaaggacacgaactcatcattttttatggctgcatagtattccatggtgtatatgtgccacattttcttcatccagtctatcattgttggatatttgggttggttccaagtctttgctattgtgaagagtgccgcaataaacatacgtgtgcgtgtgtctttatagcagcatgatttataatcctttgggtatatacccagtaatgggatggctgggtcaaatggtatttctagctctagatcactgaggaatcgccacactgacttccacagtggttgaactagtttacagtcccaccaacagtgtaaaagtgttcctatttctccacatcctctccagcacctgttgtttcctgactttttaatgatcgccattctaactggtgtgagatggtatctcactgtggctttgatttgcatttctctgatggccagtgatgatgagcatttcttcatgtgttttttggctgcataaatgtcttcttttgagaaatgtctgttcatatccttcacccactttttgatggggttgtttgtttttttcttgtaaatttgtttgagttcattgtagattctggatattagccctttgtcagatgagtaggttgtgaaaattttctcccattctgcaggttacctgttcactctgatggtagtttcttttgctgtgcagaagctctttagtttaattagatcccatttgtcaattttggcttttgttgccattgcttttggtgttttagacatgaagtccttgcccgtgcctatgacctgaatggaaatgcctgggttttcttctagggtttttatggtttgaggtctaacatgtaagtctttaatccatcttgaattaatttttgtataaggtgtaaggaagggatccagtttcacctttctacatatggctagcctgttttcccagaaccatttattaaatagggaatcctttccccacttcttgtttttgtcaggtgtgtcaaagatcagatagttgtagatatgtgacattatttctgaggactctgttctgttgcattggtctatatctctgttttggtaccagtaccatgctgttttggttactgtagccttgtagtatagtttgaagtcaggtagcatgatgcctccagctttgctcttttggcttaggattgactttgcaatgcggggtcttttttggttccatgtgaactttaaagtagttttttccaattctgtgaagaaagtcattggtagcttgatggggatggcattgaatctataaattaccttgggcagtatggccattttcacgatattgattcttcctacccatgagcatggaatgttcttccatttgtttgtatcctcttttatttcattgagcagtggttttagttctccttgaagaggtccttcacatcccttgtaagttgggttcctaggtattttattccctttgaagcaattgtgaatgggagttcactcatgatttggctctctgtttgtctgttattggtgtataagaatgcttgtgatttttgtacattgattttgtatcctgagactttgctgaagttgcttatcagcttaaggagattttgggctgagacaatgggttttctagatatacaatcatgtcgtctgcaaacagggacaatttgacttcctcttttcctaattgaataccctttatttccttctcctgcctaattgccctggccagaacttccaacactatgttgaataggagtggtgagagagggcatccctgtcttgtgccagttttcaaagggaatgcttccagtttttgcccattcagtatgatattggctgtgggtttgtcatagatagctcttattattttgagatatgtcccatcaatacctaattattgagagttttcagcatgaagggttgttgaattttgtcaaaggccttttctgcatctattgagataatcatgtggtttttgtctttgggtctgtttatatgctggattacatttattgatttgcatatattgaaccagccttgcatcccagggatgaagcccacttgatcatggtggataagctttttgatgtgctgctggattcggtttgccagtattttactgaggacttttgcatcaatgttcatcaaggatattggtctaaaattctcttttttggttgtgtctctgcctggctttggtatcaggatgatgctggcctcataaaatgagttagggaggattccctctttttctattgattggaatagtttcaggaggaatggtaccagttcctccttgtacctctggtagaattgggctgtgaatccatctggtcctggactgtttttggttggtaagctattgattattgccacaatttcagatcctgttattgctctattcagagattcaacttcttcctggtttagtcttgggaaggtgtatgtgtccaggaatttatccatttcttctagattttctagtttatttgcgtagaggtgtttgtagtattctctgatggtagtttgtatttctgtgggatcagtggtgatatcacctttatcattttttattgcatctatttgattcttctctctttttttctttattagtcttgctaccggtctatcaattttgttgatccttttaaaaaaccagctcctggattcattaattttttgaagggttttttgtgtctctatttccttcagttctgctctgattttagttatttcttgccttctgctagcttttgaatgtgtttgctcttgcttttctagttcttttaattgtgatgttagggtgtcaattttggatctttcctgctttctcttgtgggcatttagtgttataaatttccctctacacactgctttgaatgtgtcccagagattgtggtatgttgtgtcttttttctcgttggtttcaaagaacatctttatttctgccttcattttgttatgtacccagtagtcattcaggagcaggttgttcagtttccatgtagttgagcggttttgagtgagtttcttaatcctgagttctagtttgattgcactgtggtctgagagacagtttgttataatttctgttcttttacatttgctgaggagagctttacttccaagtatgtggtcaattttggaataggtgtggtgtgatgctgaaaaaaatgtatattctgttgatttggggtggagagttctgtagatgtctattaggtccgcttggtgcagagctgagttcaaatcctgggtatccttgttaactttctgtctcattgatctgtctaatgttgacagtggggtgttaaagtctcccattattattgtgtgggagtctaagtctctttgtaggtcactcaggacttgctttatgaatctgggtgctcctgtattgggtgcatatatatttaggatagttagctcttcttgttgaattgatccctttaccattatgtaatggccttttttgtctcttacgatatttgttggtttaaagcctgttttatcagagactaggattgcaacacctgcctttttttgttttccattttcttggtagatcttcctccatccctttattttgagcttatgtgtgtctctgcacgtgagatgggtttcctgaatacagcacactgatgggtcttgactctttatccaatttgccagtctgtgtcttttaattggagcatttagcccatttacatttaaggttaatattgttatgtgtgaatttgatcctgtcgttatgatgttagctggttattttgctcattggttgatgcggtttcttcctagccttgatggtctttacaatttggcatgtttttgcagtggctggtactgactgttcctttccatgtttagcgcttccttcaggagctcttttagggcaggtctggtggtgacaaaatccctcagcatttgcttgtctgtaaaggattttatttctccttcacttatgaagcttagtttggctggatatgaaattctgggttgaaaattcttttctttaagaatgttgaatattggcccccactgtcttctggcttctagagtttctgccaagagatcagccgttagtctgatgggcttccctttgtgggtaacccgacctttctctctggctgcccttaacattttttccttcatttcaactttggtgaatctgacaattatgtgtcttggagttgctcttcttgaggagtatctttgtggcattctctgtatttcctgaatttgaatgttggcctgccttgctaggttgcagaagttctcctgggtaatatcctgaagagtgttttccagcttggttccattctccccatcactttcaggtacactaatcaaacgtagatttaatcttttcacatagttccatatttcttggaggctttgtttgtttctttttactctctttcctctaaacttctcttctcacttcatttcattaatttgatcttcattcacttatatactttcttccacttcatcaaatcggctactgaaggtattgcatgcatcatgtagttctcatgccatggttttcagctctatcaggtcatttaaggtcttctgtacattgttttctctacttagccattcgtctaatcttttttcaaggtttttagcttccttgtgatgggtttgaacatcccctttagctcagagatgtttgttattactgaccttctgaagcctgcttctgtcaacttgtcaaagtcattctccatccagctttgttccattgctggtgaggagctgcgatcctttggaggagaagaggtgctctggtttatagaattttcagcttttctgctctggtttctccccatctttgtggttttatctacctttggtctttgataatggtgacctagagatggggttttggtgtggatgtcctttttgttgatgttgatgctgttcctttctgtttgttagttttccttcgaacagtcaggttcctcagctgcaggtctgttggagtttgccggaggtccactccagaccctgtttgcctgggtatcaccagcggaggctgcagaatagcaaatattgcacaacagcaaatattgctgcctgatccttcctctggaagcttcgtctcaaaggggtgcctggctgtatgaggtgtcagttggcccctactgggaggtgtctcccagttaggctagatgggggttagggacccacttgagaaggcagcctgtccattcacagagctcaaacactatgctaggagagccactgctctcttcagtgctgtcagatggggatgtttaagtctgcagaaatttctgctgccttttattcagctatgccctgcccctacagatggagtctacagaggcaggcaggcctcattgagctgcggtgggctcctcccagttcgagcttccagaccactttgtttacctactgaagcctcagaaatggtgaacacccctcccccacccagtctgccgccttgcagttccatctcagactgctgtgctagcagtgagcgaggctccatgggcgtgggacccactgagccaggcacaggatataatctcctggtgtgccatttgctaagaccattggaaaagcacagtattaaggtgggagtgtcccaattttcccagtacagtctgtcacgggttccctcatctaggaaaggtaaatcccctaaccccttgtgcttcccggtgacgcaatgccccaccctgcttcagctagccctccatgggctgcatccactgtccaaccagcccaatgagatgaacaaggtacctcagttggaaatgcagaaatcacccatcttctgtgtggatcaggctgggagctgcagaccggagttgctcctattcggccatcttggaatggcaatctatgtttgctttttacatttgaaaaaactggtgtcacgtacctaggtattaatcattgtggtatcctcttgccgatttacctctttatcattaactagtgaccctccttgtcttttgttgttacagtctgtgattttagtctattttatctaatatgagaatagctactctggcacttttttggtttccagcttcatgaaatatccttttccatttccctgttttcatttccctttcggtgtctctatagatgaagttgatttctttaaggcaccataagttgggtcttatttctttatccatttgaccatttagagaatttagaacactgtcagtgttattattcataagtaaaaacttaagagtgggtgtagtggtgtacatctgtatttcctgcactttgagagactgaggcgagctgatctcctggggtcaggagtttgagaccggcctggtcaacatgatgaaaccctgtctctactaaaaatacaaaaattagccaagcatgctggcatgtgcctgtaatccaatttacttgggaggctgaggcaggagaagcttgaacctgggagacaaatgttgcagtgagctgagatcacacagagaagtcatctccactctcctcatcagaacctcttgttcacagcatttgtgagcacaaatcaatgatggttattctttcctactaattagggatattttattacacagcaatagcctccagcaaagggaaccatcatacatgattcctacaagttgacagggctggaattatcactgaaaaactaaggtggctatacttgattcccaatgtccaatttttcatgaatagagaaatttatcctttttccccccagccagaaaccaagttttgctcttacgcccaggctggaatcaagtggcacaatctcagctcactgcaacctctgccccccagcttcaagaaattcaccttttgaacaaggagatattaaggatacactatgtgtatgctaccggtggttgcaggagactcagaaaagagagaaacagtcactggcctcgtgcaactgatattctcgggaggagagaaaggcaatcaagaaagaaacatgctgtatttcagacagctgtaagtcctccacaagaaaagaaagcaggtgaggaacataggaaatgtgtcaaccataaggttcccgctaattctataagttggtcagggatatcctccaagaataagcagcatctgagcaatcacctgaagggaggaaggaaggaagactgtgagtggtggcttacacctgtaatcccagcactttgggaggccaaggagggcagattgcctgagctcaggagttcacgaccactcagagcaacctgttgatacccaatctctactaaaaacacacaaaaaaattacccgggtgtggtggcacgcacctgtagtcccagcttccatgcccagctgatttctctctctccatatatatatatatatacacatatattgtttttgcagagatagggtctcactgtgtcacccagtcatcaagcaattctcttatactgttttggaaaagcatgggaattacaggtgtgaaataccctgctggtcctgaaaaatgtgatatttgggattctctgcctggcttgttttacccaaaataatgacctccagttccttccaggttgctgcaaaagacatgattttcactgttttataactgaatagtattcctgtatgtatacataccacattttctttatttattcttctgttgattgacatgtagggtgattccatgtctttgctactgtaaataatgctgcagcaaatatttgtgtgcattttgatctattcctttgagtaggtacccagtactgcaactgcaggactgagtagttgttatattttttgttctttcagaaatctccatagtgtttgccataaaatctgcactaatttacattcccaacaacaatgcataagatttccccttttctccacattctcactaacatttgttatgtttttgtctttttcataatacccattctgactggagtaagatatctcattgtggtggttgttgatatttttgagacggggtctcactctgttgccagactggagtgcagtggtgtgatcgtggcttgctgcaacctccacctcccgggttcaagcaattctcctgcctcagcctcccgagtagctgggactacaggcgcgtgccaacaggcctggctcattttttgtatttttagtaaagacagggtttcaccatgttggccaggatgatcacagtctcttgagctcatcatacacctgcctcagcctcccaaagtgttggaattacagtcatgaggcagcgcacccaacctcaatgtggttttaatgaccatttctctgacgattcatggtgtggagaatttctttgaaataccttttggccatttatatgtgctcttttaaaaactgactcctgtccaggtgcggttgagcatgcctgtaaccccagaacttcgggaggctgaggccaatggatcacttgaggcaaagaggcagaaatcagcctggccaacaaggcaaaaccccatctttactaaaaatacaaaaaatcagccacgggctgtgactcgtgcctgtggtgcaagttactcaggaggttaaggcacaggaattgcttgaacccggtaggcacaggtcacagtgagccaagatcatggcactgcactacagcatgggtaatagagaaagacctgtctcataaaaacaaatgaataaataaataagataaaaaataaaaaagtctctttatgtcctttgccgactttttaatgggattctttggagttttctgttgtagttgagatctttgtttactctcggtattagtcttttgtcaaaggaaaagtttacaaataatttcttccgttctgcagtttgtctgctcactctgttgagaggattatttctttggctgtgcagcagctttttgtttcagtaaagcttttgaatttatataattaaaattttcagtttggtttaaatttgcactggtcgatttttggttttgttgcctgtacttttgaagtcatactcttgaactctttactagacaataaccagaagagttttctctagttttcttctcacatttttattatttcagtacatatatttaagtctataattcatcttcaattgatttttgtagaaatagtgagaaataggagtccaggtttattcttctgcaaatgacaattcaattgttccagcaccaattattgaaaagggtgtgctttcctcaacgtatattcttatcagctttgtcaaagatcagttggctataaatgtgtggctttctttctgggctctctagtctgttacatcaatctgtgtgtctatctgtatactactaccatgctgtattggtgatgatggctttgtaatataatttgaagtcaagaaatgtgatgctcccagctttgtttatttgcttcagaaaggctgagtcaacagctgcagagatgaagctgcccctcctcgcagggctccttcccggaaaaagatcatggctcccactgaccatataaccatggctggaactcctgaaattcccaaagggaggccctacccagtgaggggggatgaatgaaggtcctacttaaggaatctgtctggccacaatcaggcacagcagctgtgctgccttgtgggggaccagaccacctggattccctggagcctgcaggctagaatgtctgagtccatggaaacacagaaatggaggccgccctcacctccccagaaaactgtagtctcaggcagtctccagccgattgccactggttggctgctattccaagccagtgggtcttaacttgagaggtgctgtggaagtggggcccacggaatgaggctgcttggctccctggattcagccccttttctaagggaatgtacagatggaactcccgccttgcccagctttccaagtatataaaactcctgagtctctgtgagtgtctgagcgagtgctctggcaacattcgacacggctctgtgtatctgacccaagacccttatggcatgagctaatgggaggatcttctgatccatgcgtggcaaagatgcatgggagaaacatggtttgtgggtaggggttgtgcattcactactgcttctcttggctgtaggtgaaggtttctttggctctgtgctgatactgggtgcaccatcacccaccccctttgtttcttctcctgggtcaagtcatttgcctaatcagtcccaatgtaggaacctggatacttcagttcaaggtgctgaattcaccgtgcttttcattcaggggaagacagctgcttctcattgggcatcttggcctgcccacttcacgtcactttttgtaaaatccacaccactccaggaatatccattacttaacttcgcctgaaataaacagaaggctcattacacttatcatgggctcacttacttcgcctataatgaaggtgccatggaaatgctagtggatgacgtggtccattttcttagggatgagatagaaaaatggtgtatggctttttaatttaattaaaatttttagtttggtttaaatttacattggtctctttttggttttgttgcctgtacttttgaagtcttactcgtgaactctttactggacaatgaccagaagagttttccctaagtttcttctgatattttgaccatttcagtacatacatttcagtctataattcactttaaattgatttttgtaaacatggtaagaaataggagttcagatttattcttccgcatatgataatgcaactgtcccagtaccaattattgaaaagggtgtgctttccctagtgtatattcttgtcagctttgtcaaagatcagttgcctatgaatgtgtggctttcattttggattctctcgtctgttacatcaatctgtgtgtccacatttatacctgtaccatgctgtattggtgactatggctgtgtaatatattttagagttaggaaatgtgatgctcccagctttgttcatttgcttcagctgaaaaggttgagtccacaattacaaagatggcagccgcccatccccggaggacctccaacccagaaagagatcaggcttcccaccaaccctataaccctggctggagttcctgaaattccaacagggaggaccttcccagtgaggagggatgaatcaaggtcaaatttaaagaaacagtctggccactatcaggcacagcagcagtgctgccttgtgggggacccctcctgctccagaccagctgccctccctggagcccgaaggctagattgtctgagtctacggaaacagagacggtggccgccccaaccacccagaactcggtagtctcaggcacttggcttgctatcttgccactgcttggctggtattccaagcccgtgggacttgagaagtgctgtgatgatggggaccacaggatgaggctgtctggctccctgtgatatggctgtgatgagtggaggaacaccagggctcatgtctcacacagaattggagaaaatgacacaaacacatgtacagtggttttatggcgtgcagtttaataggcaagaacgaaggaagagctccccatactgagacagagggaggggggctccaaagccaaaagaggaaacccggagtgctgtggataccaatgagttatatgaagaaactggagggggcggtgtctgatttgcatagggttcaggcgattggttcgaccaggcatgtcatttatgtggcccacggaaaaactggccctcccacctagcctttgaatatgcacgtgccggacaccctgatttcctacactcatggggatatatgggggtggccatatcgccaggcacaggtggggacaagggccagaagagggcgggaatcgctatgtttgggtggacccagtttctaatggccggcatctgcagatcaaggttaccggagaactctaaaagccggggctttcctgctagacaagactcatttctggagctgctttaaaaagaaacaaaacttcccaaggaccccttttcctccctgtctgcccaaaataatttcttaacaactcgtataacacctgaattcagcccccttactgggggaatgtaccaacggaactcccacctttcctggtttctcaaggctagattgtgtaaacctcctgggtctcggtctgtgtctgagcagctgctctgccaacactccacacagccctgtgtactaggcccaaggccgccgtgactcagcccatgggaggatctcctgatttcttggttgcaaagatccatgggagaaaaatggtttctggggcggggtcacacactcatggcttctcttggctgtgcaagaaggttcctttggctctgttccaatatagcgtggttcatcacccacccctgttttctttgttctcctgagtcaagttgtttgcctagtcagtcccaatgtgagaacctgaatatttcagttcacgtgcttatcgtgaaattcactgagactttaattcagtggaaggcagcctcttctaattggccatcttggcccgccccctccacgtcacctcccataaaatggccacgctctccagggacgatgccattatatatctttacgtgaaaccgacagaacacttattacactttttgtgagctcatttacttcacttataatgaacatggccatggaaatgctagtggagaaagtggtcgattttctgatggatgtgataaaaaaatggtttgccgaccaattaatgacatatgtctcaaaactagtaacgagacccttaatcgctgggttgaagtttctaatcaagaagatgctcatctatgtattcaacaaagcagcttcccttgcttctgaaatgcttccaaacaacatctcatatttcctgaagaagataatgcctggacaagcagcacaagtcattcaggtttactttcagctcataaatccagcaggatattcgcacaattgttgggaaaccttatcagttcatgagtcgtgcatgtttcctttaatttcaggaggaagagggtaatctggaagagtttcctgacctactctgctgctgtgattaaacaaccaccaggaaattttgatgacactgttctcctgagctcctccctttcctcggggaagaaaagcattgaaactacaaaaataaagtgttatttggctggagtgaggtctcatgtctgcttatgcggtggctcgctgctcagaacagggtgagtctctgagttgtacgctgaggaggggaggctgtcaatctagaaaaaacccattgcatgggacacctccatggggtctggggggctgaggatgaggagctggactggatctagggaaggaggaggtttcagagggtgaaattctggcagtaaatcctgggggtgtttgaaaacttcctccctcagaaggagaagactcagggaggaataaggacaaaccatgggtcccttgaggggcatttactaacttaagaggactttatcgggaagcagagtgacaatggcctccttgaggactgaggcccctggataaatgaggcccagatccagatccagtccatgggagatgagaccttcaagggacatatttttgttgggacagaggaaaagtgcagctctgcagctgcagaggaagccttggcagtgtgaaagcgaccttggagggggccctgtgcgttctgaatgcttctgaggtccatcccctgtccccgcctctttttctggattttttgggctccatggtctccgccatcttctgagcgctccacgctgccaccttcagttttctcttctgggctccaaatactccaaaatctttcatatctgtgcccctacccctgtttttagcatgtgttgggactccaggtccctgaaggtttctggcctgaaatccacctccccagcggtgtggattctgctctagagaccccgcacttggcaaggttcccaggcccctgggggacaaccgagtggtatgtgcacttcagggctccacactcggcaaggtctttcaagcccttggggttccctcctcagttttcttcacatgtctgggatgtagtcactctataaatgccgggatgtgatccccaccccagtgattttttttagttccatgagtgttgctatctgaatagtcatcctgagagtgatgggaccttttgaatttgcagcaagttttagattagtgtgagtggcctgagatcgcaaaactggggctagcattggatgtgaggttaggctggtggaaaaatttgcccagaacctgaggagtgtgggctcactgcaggtggttaggatcagcacagaattgcaaggatgtatagctttggggtaaagaataacatggttcagaagtacatgtattagtcttttcatgcattgctataaagaattacctgagactgggtaattaattataaaaactcaggtttaattggctcatggttccacaggctgtacaaaaaggatgatgctggccatcagctcaacttctggggaggcgtcagaaaacttagagtcatggcaaaaagcacaagggaatcaggctcatcctccatggccagagctggagctagtggtaggagaggtgctgcacacttttgaacaatcagatctttttagaactctatcaccagacagcacctagaggatggtgctaaattattcatgaaatatccacccatatgatccactcaattctcaccggcccaaccaggaccacctccaccattggggattacaattacacatgagatgtgggtggggacacagatccaaactcgatcagtgggcatcttggactgggtctactatagaagaagaaccaggagctgactatcatccttaagactgcccatgatggccaggcagggtggctcatgcctgtaatcccagcactttgggaagccaaggtgggtgaatcccctgaggtcaggagtttgagaccagcctcgccaacatggtgaaaccctgcctctactaaaaacacaaaaaattagatgggtgttgtgccagacgcctgtaatcacagctactccagaggctgaggcatgagaattgcttgaacctgggaggcggaggtggcggtgagccccaatcgcactgctacactccagcatgggcaacaataccaaaacatcgtctcaaaaaaaaaaaaaaaaaaaaaaaaggctgcccatgaccactgccccagtgagagggacaccagcatggctaagatcaagtgctggacattcttcatgggtcagacattaaagcaggccacactgttacagagatgggctccattcatagcaacaaagtggtgagaagatgtgggaatggcagaggccagcactttgccatcaatgcaaggtgggcataaggagctggcaccagtgccagagtgcatcaggggaggactgctttgcaatatctagcacttacctcttagagtatgtttcattagggacaacagatataaatggcagacaagtgagtcccttcagtaacaggaaatagaaatcatcaagaggaacagaaacagatgtcagcagccctcatataaagtcatcatccttcatccagttaaaacctgagacagttctcacataagaaggtctaattcaaaaagagactgggttctcatgaggcaggttcatgcaaaaccaagggaagtatacaactttgggattctccagcttcccttggaaaagacctacaatcatttgcttaggtaactgagcactgaacaaaggtgagtattgttatctttcagaagctgttggccatgaaggtcttgctggcataaaacccatggttggaaacatcaccatgacccctgttagagtaatggcctaagggcaagggtcaggaaattgatgtattccttgccaacttctgcgagacgagtgttggtccactcatctctttcacggaattcaccagtctggtatcttcaaaatccagaaggatgatggcagatggcaggaaactaatgcaaacaccatcagttgtacctccactgtagcagcagtaatggatgttatctcttcattgtaatatccagggagggagaagatgacattattctcaatattctaaacaccctgtgtgtacagcctctgtgatattttttgtaatatccgtgtgggagagaattatattactcctaatatctcaggggttgtgccccctctgtgacaatgttcctaacacccaggaggggataggatgatatcacttttagcatcacagggggtgtacaccccactgtaatattgttcataatatccgggggggagagaatgatattactcccaatatcgcaaagactgtacaccaacctgtgatattatttgtaatatccataagaggaagaataatattactcccaatgtcacaggaagtgtacacccttctgtgatattgttcaaaagatccagttagggaggggatgatattactctcaatatcttaaacaccctgtaggtaagccctctgtgatattcctcataatatccagagggagaggatgatattactcccaatattgcatgaagtctacaccccacctgtgatattgttcctaatatccaggatgggagaggatgatattactcccaatgtcgcaggggatgtacaccttccctgtaatattgttcgtaatatctagaaaaggagaggataatattactttcaacatcgcagggggtgtacaccttccttgttatattgttgctaatatccagggaaaaagaagatgacattaccaccactattgcagaaggtgtacacccccccttgatatagttcctaatatccagaaaaggagaggagatattactccaaatattgcaagaggtgtacattcccctgtaatatttttcctaacattcaggaagaaagagagtgatattgcccttaatattgaagggagtgtgccccccccgtgatattgtttctaatatccaagaaatgaaaggatgatattactcccaatatcacaggggctgtacagccccctcccatgatattgttcccaacatcggggggggggtgaaatagtattattcccagtatcacaataggtgtacacacctgtcgtgatattgttcctaatacccatgggggaaaggacgatattattcttaatatctcagagggatgtacaccctccctgtgatattgttcctaatatccggggtgggagaggatgatattacccccaaaatctcaaagggtgtacacccctcttgtgatattgttcctaatatccagggtggagaggataatattattcccaatatccaggaaaggaaacgatgatgttactgtgaatattccagggggtgtcctcccctctgtgatattgttcctaatatccaggttggggagattatgatatttctccaaatatcacaaggggtgtacaccaaccctgtgttattgttcctaatatcgatggggggagaggacgatattactcccaatatcacagggggtgtacaccacctttatgatattgttcctaatatccatgaagaaagaggatgatattactttcaatatcgcaggggatgtacactccccctgtgatattgttagtaatacctaggagaagaaagtgtgatattactcccaatatcgcaggggatgtacacgcttcctgtgatattgttcctaatatttagggggaaaggggatgatattactcccaatatcgaatggtgtgtacacccccccgtgattctttttttttttttttttttttttttgagatggagtcttgctctgccgcccagactggcgtgcaatggcgcaatctcggctcactgcaacatttgcctcccaggttcgcacgattctcctgcctcagccttcggagtagctgggattataggcagctgtcaccataccaggctaatttttgtatttttagtagagttggggtttcaccatgttggtcaggctggtcttgaattcctgacctcaaataatccacccaccttggcctcccaaagtcctgggattacaggcataactttccctgtgatattcttcctaatattcaggaagaaagaggatgatattgctcccaatatcgcagagagtgtgcactcctcctgtgatatggttcttaatattcagaggaggagaggatgatattactttctatattgcagaaggtgtacacctccctcgtgatgtctttcctaatatccagtgggggagaggttattagtctcaaaatcacagaaggtgtaaacccccatttgatattgttcctaatattcaggggtggggagagaaaggtattactcctagtatttcagggcatgaacacccccaccgtgatatcattcctaatatccagaaggggaggcaatgatatttctcctaatatcacaaagggtgtacaccccttctgtgatattgtaaatattctgtgtgtacacccccctgtgttatagtctgtaatatccgggtgggggagagggtgatatttctccccatattgtaggggatgtacacccttctgtgatatggttcgttatatccagggaagaaaaaggtaatattgctgcccatattgtggagagtgtacacccccatgtaatatggttcgtaatatccaggagtggagagggtgatactgctccttacatcgaggaaggtgtacaccttattgttatatgattcgcaatatccaggggaggagagagtgatattgctccccatgtcgcagggggtgtaaaccctccgtgatatgattggtaatatccaggaaaggaaagggtgatatttctccccatatcgcgggggacgtacatcctcctgtgatatggttcgtaatatccaggaggaaagaggaaaatattgctcttcataacccgaggggtgtacaacccctgtgatatggttcgtaatacccagaagtgtacacccctctgtgatatggtttgtaatatccagggggttagagggtgatattgctccccatatcgcagtgggggtacacccccctggattggttcataatattcatggggggagaaatttacatttatcctcatatcagggggggtgtacaccccccgtgatatggttcgtaatatccaggggaagaaagggtgatattgctccttatatcgcggaaggatcaccctcccctgtgatatggttcataatacccagacgggaagagggtgatattgttcttcataaagcgaagggtgtacagccccctgtgatatggttcataatatgcaaaaggggagagggtgatattgctccccatatcacggagggtgtactcccttctttgatatggttcgtaatatccaggggtgtagatggtgatatagctcgccctattggggagggtgttcacccctctgtgatattgttcgtaatgtccagggaaagagaggatgatattactcccaatatcgcagaaggtttacaccactctgtgatattgttcataatatccagggaaggagaagacgatattactcccaatatggcagggggtgtagaactcctgtgatattgtttgtaatatccaggcaaggagaggatattactctcaatatcgcagaaggtttacacccctatgtgatactgttcatgatatccagggaaaaagaggatattactccctatatcacaaagggtgtacacccctttgtgatattttttgtaatatccaggggagagaggataatattactctcaatatcagaaggggtgaaaaccctcctgtgtcattgttcataatatttagggaaggagagagtgatattactccaaatatcacagtgggtgtacacccccctatgatattgttcctaatttccagaaggggagatatgatattattgccaatatcgcagaaggtgtacaccttactctgacattgtttgtaatatccagatggggaaatgatgatattactcctaatatcacagggggtgtacacccccttgttttattgtttgtaatattcaggggaagagacgattatattactcccaatatcgcagggtgtgtacaacactctatgatattgttcataatatccaggggaggagaggaagtgtacacccccccgtgatattgttcgtaatatccagaggtagagaggatgatattactcccaatattgcaggtggtgtacacctttctgtgatattgtcatgatattaagaaggggagaggatgatattactaacaatatcacaaaaactgtacactccctgtgatattgttcataatatccagaagaagggaggatgatattattctgaatctcgcagaagatatacaccaccctgtgatatggttcataatatcctaggggaaagaggatgacataactgtcaatatcgcagggggtgtacaattccctgtgatattgttcacaatattcagagggaaaaaggataatattactttcaatatcgcaggcggtgtacacattactgtgttattgtttataatatccggaatgagagaaaattttctcccaatatcacaggaggtgtacactcccctgtgatattgttcgtaatatccagggaggggagaggatactattactcccaacatctcagggagtgtaggccccccctttgatattgttcctaatattcggaagtggagaagatgatattacttccaaaatcgcagggggtgtacactccctctgtaatattgtttctaatattcatgagtggaaagaaagatattactcccagtattgcaggggacatacaccacactgtgatcttgttcacaatattcgggggggagaggatgatattactcccaatatcaaagtaggtgtacacccccttctgatattgatcgtaatatccagaattaaagatgataacgttactcccaatattgcagggggtgtacatttttgaatactgttcataatattaagagggggaggggatgatatctgtcccaatatcgcaaagtgtgtacacctcctgtgacattgtcccaaatatccagaggaaaaaaggatgttattactcttaatatctcagagagtgtacacctccctgtgatattgtttgtaacatccagaagaaagaggctgatattactcttaatatcgcagggggtgtacacccccgccccgggatattattcgtaatatccagggggaagtggaatgttcagaatgggagaggatgatattacttgcaatatcatagtgggtgtacaccccactgtgatattgtttgtaatatccgggaaaggagaaaatgacattcctccccatatggcaggggctgtacaccacctatcatattgttcaaaatatccagaaggggagaggatatgtctccaagtatcacagggggtgtacaccccgctgtaatattcttcctaatatccagggtgtgagaggataatagtactcccaatatcccagggcatgtacaccccccttgtgatgttgttcctaaaattcatggggagaaagaatattactcccaatatcacagggggtgtacatacactctgtaatattgttgccaatatgcagcaggagagaggatgatattactcccaatatcacaggggctgtacaccccgctgggatattgtttctaatatcaagggggaaaaaggatgatattactcccaatgtcgcagggtgtgtacttcctctttgtgacattgttcctaatatccaggagagaagagggtgacattccttccaaaactgaaaggggtgtacacaccctttgagatattgtctttaatatccagaacgaaacaggatgatataactcctaatactgcaggggggtacaccctctctgtgatactgtttctaatatccaggaggggaaagaaaaatattaatcccaatatcacagggggtgtacattccccctttaatattgttcctaatatccaggaagacacaggatgatactatttccagcagcacagggcatgtacacccctttgtgatattgttcctaatatccaggaaaagagaggatgatattactgtcaatattgcagggcgtatacactggttctgtgatattgtttctaatatccgggggtggagaaaatgatattactcccaatattccagcgggtgtacacccgttctatgatattgttcctaatatctgggggagagagaatgatattattgtcaatatcacaggggatgtacagattccctgtgatattgtttctaatattcacagggggagaagggtataatactcccgatatcgcagggggtgtacactccccctgtgaagttgttcctaatatccagggattgagagaatgatattactcccaatatcacaggcggtgtaaaccccctgtgtgatattgttcctaacatccagaggaaaagatgatgatattattttcaatatcacagggggtgtacgcatccctgtgatattgtttctaatatccaggggaggagaggatgatattattgttaatatcgcagggggtgtaccccaccctgtgatactgttcctaatatccggggtggaagaggataatattgctcccaatatcgcaaagggtgtacaaccttcctgagatattggtcctaatatccagggagggagaggatgatattactttcaatatcacagggagtttacacaacccctgcgatattgttcctaatatccagcggaagaagagttaggataatactattttcaaaattgctgggtctgtaccccctccccgtgatattgtttctaatatccaggaggggagaaagtaatatgactcccaatatcttagaagatgtacaccctccccataatattatttcttacatccagggggtagaggatgattttgctttcaatatcacagagggagtaaacctttccggtgatattgtttttaatatttaaaaagagagaagataaaattactcccaatacaaaggggatgtattgtgtactcccccctctgatattcttttttaatatccagatggagagaggatgatattactttcaatattgcatgggatgtataaatcccctgtgttattgttctgaatatacaggtggggagagtatgatattactccaaatatcgcagggggttctttccccctgtgatattgttcctaacattcagggagggagaggatgatattactcttaatattgcagggggtgtacccacgcctatgatattgttcctaatatccagagggggagaggatgatctaactcagaatatgacaaggggtgtacacacagcctgtgatatggttcctaatatacaggggagaaggggataatatttctcccaatatcgcagggggtgtacaaccccctgtgatactgttcctaatatacagaaggggacagcatgatattgttcctaatatcgcaggaggtgtacaacgccctgtgatattgttcctaatatccagggcgggagaggatgatattaccctcaatatcgcagggggtgtgcactttccctgttatattgttcctatgatccgggtggggggaaatgacattagtcccaatatcgcaggatgtgtgcaccgctcccccgtgatattgttcctaatatcaagggggagagaggaggatattactcccaatatcgcaagggatgtacatcctccatgcgatattgttcgtaatattcaggaggagagaggatgatattactcttaatatcgcagaaagtggacacccaccctgtgatgttcttcataatatccagggaagcagacgattatatgactttcaatatcgctgggagtgtacatcccttttgggatattgtttctaatatccaggaagggagaggattatattactctcagtattgcaggcagtgtacaccttttttgtgatattgttcctaatattcagaaagggaaaggatgatattactcccaatattgcaggtggtgtatatccccctctgatattgttccttatatcaaggaagagaaagaataatattactcccaatatcaaagacagtgtagacccctcctgtgatattgtatttaatatccatggggaaagaggatgatgttactcccaatatcgcagggggtttacacccacactgtgatattattcctaaaatccagtggaggagaaaataatattgctcccaatattgcagggtgtatacaggccctcccccgttatattgctcctaatatccagcggtggagaggatattactttcaatttgtgtagggagtgtatacccccctgtgatatttttctaatatcaaggatgggaaaggatgacattactcccaatatcgcaggaggtgtacacgccctgtgatattgttcctaatatctagggaaggagaggatgatattactttcaatattgcaggagctgtacaccctctgtggtattgttcttaatatttaggttgggagaaaatgatatgagtccaaatatcgcagaaggcatacacacttccaataacattgttcttaatatccgggggagagggtgatattactcccaaaatctctggggggtgtacacccccttctgatatttttcctaatatccagggaaggaaacgatgatattactataaatattccaaggagtgtacaccttcctaatatcctaatattgttcctaatatccaggggtgggagaggattatattactcccgatatcgcagtgggtgtacacccctcctgtgatattgtttctaatatccaagctaggagaaaatgatatcactctcaataccacagggggtgtacaccttccgcatcatattgttcctaatattcagagggaaagaagatgaagttactttcaatatcggaggggttgtacacaacccctgtgatattgctgctagtatccaggaagaaaggggattatgttactccccttatagcagggggtatacacctcccctgtaatattgttcctaatatcaaggctgggatatacgtggggggaaggatgatattactcccaatatcgcaggggttatacaaccttctgtgatattgctcctagtaaccagggcagaagaagatgatattactcctaatatcgcaggaggtgtacactcccccattatgttgttcccaatatgcagaaaaggagaggatgacattattgccagtatcgcagggtgtgtacaccacccctgtaatattgttccaaatatttagggggagagaggatgatattactcccaacatcgcagggggtgtacacacatcccctgtaatatagttcttaaaatctaggggaaaaggggatcttatttctctaaatattgcagagggtgtacactccccggtgatattgttcctaatagccgggagggagataattaaattactttcaatatctcagagagtgtacatcgcccttgcgatattgttcctaatatccagagcaaaagagaatgatattactcccaatatcttaggagtgtacatttaacctgtaatattgttcctaatatccagggggaagagaatagtattactgccaatatcgtaggggttgtacaccttttctgtgatattgttgcaaatatttagtagagggaaagaatattactcgcaatatcacagggaatgtatacttcccctgtgatattgttctgatatccagaaaaagagagggtaatattactcccaatattgcagggggtgtacaccccccttgtgatattgatcctaatataaaggaaggaagaggatattactcctcatatagaaggggttgtccaccccccttgtgatattattcctaatattcagggaagcagaggatgatattattttcaatatcacagagggtgtgcagtccacctgtgatattgttcttaatattcggggggagaggatgttattatgcctgatatcgcagtagaggtacacccctcaagtgatactgttcctaataaccaggggtgaagaggatgatattactcccaatatcgcaggtggtgtacacccccccatgatggtttctaatatacagagggggagaggaaaatattactcccaaaatcgctggaggtctacaccccccttgtgatattgttcctaatatccaggaaaggaaacgatgatattactgtgaatattccagggggtgtacacccgctttgtaatattgttcctcatatccagggtgtggagaggattatattactcccagtatcgcagggggtgcacgacgcccctgtgatattgtttttcatatccaggaggggagattattatcaatatggcaaggggtgaacaccccctgtgatattgtacttaatagttaggttggcagaaaatgatattagtctcgatatcgcagggggtgtgcactccgcctggtgatattgcttttaatatcaagggggagaaaatggcattactcccaatatcgcagggggtgtacaccgctcatgtgatattgttcctaatatccaggtggagagaacataatattactcccaatatcgcacaaggtgtacacccctcctgtgatatggttcctaatatccatgggaggagatgatgatattactcccaatatcacaggggatgtacaccacccttgtgatattgttcctaatatccagggaagaaaacgatgatattattgtgaatattacagggagtgtacacactccctgtgatattgtttttgatatacagggtgggagaggatgatattactcccaatatcacataaggtgtacaccccccgtgatattgttctaaatatttcggtggggagaaaatgatattagtctccatatcacagggggtgtgtgctcctcaggtgatattgtttttaatatcaagagggggaggagattatattactttcattatcacagggggtgtacacccctcctgtgatattgttccttatatccaggcgaggggaaaataatattactctcaatatcgcaggaggtgtacacaccccatgtgatattgttcctaatattaagggggaaagaagataatattactttcaatatcacagggtttgtactcctttcttgtgatatagtttttagtatccagggggaaagagcatgatattactcccattgtagcaaggggtgtacacacctcctgtgatattgttcctaatatccagaagtggtgaggatgatattactcccaatatcgcagggggtatacaccccacctatgatattatttctaatatccatgggaaaagagtatgatattacacccaatgtcgcagagggtgtgtatttttcctgtgatattgtttctaatattcaggcggggagaagatgatattactctcaatatagcagaaattgtacatccccgctgtgatattcttcataataatcagggaaaaagaggatgatattactaccaatattgcaggggggttacacttcccctatggtagtgttcctaatatccaggaagaaagaggatgatattaatcccattatccaggaagtgtacacccaccctgtcatgttgttcctaatatccagcagggaagaggatgatattacaccccccccccgtgatattctccttaatatccaggaggggagaggctgatattactggatatatagcaggggtgttcataccttctgtgatattgttcctaatatccagaaaaggagaggatgatattacttccaatatcgcagaaggtgtacacctccctgtgatattgatcctgacattcagaaggggagaggatgatattactcaaaataccgcagggcatgtgcattcccttgtgatattgttcctaatacccagaagggaacaggataatattactttcaatatcgcagggagtgcacacccccctttggtatggttcttaatatccagaaggaaagagggtgctattactttccatattgcaaggggtgtacaccccactgtggtatggttcataatatccaggcagggagagggtgctattactccccacagtgcggggcatgtacaccctgctgcggtacggttcctaatatccagggggagagaggatgctatgactccctatatcgcggggtgtgtacacccctgtgtggtatgttttgtattctccaggaacggagagggtgttgttacccctcatatcgctggaaatgtacactcccctgtggtatggttcgtaatatccaggggattgagggtactgttacccccatactccccatatcgtggggggagtgcacctccctgtggtatggttcgaaatatccagggtaagagagggtgctattattccccattttgcaggaggcgtacacccccctatggtatggttcgtaatatccggggtgaggggatgctatcaaaagaagagagaaagagaccccccatattgttctatattattttatactcagtacctgttttaagaagaaacaaggaagtgaaaccaaaagcaggcagcccggcgccaggcaccagacccaaaaccagacccgaaaccaggcctgggcctgcctgaccttagcctgatagttaaaattcaacccatgacctagcaaccaatgttatccatagattccagacattgtatggaaggacattgtgaaatttcttgttctgtgctgtttcactctgattaccggtgcctgcagcccctgtcacatacccactagattgctcaatcaatcatggccctttcatgtaagatctttagtgttgtgagcccttaaaaaggacagaaattgtgcactcaacaagctcggattttgagacgctagtctttcgatgcttccagctgattaaaagccacttccttcactacctcggtgtctgtggggttttgtccgcgactcctcctgctacactatgactccccatatcaaggggggtgtacacccccctgtggttcgtaatatccagcaggggaaaaggtgctattactccccatattgcagggagtgtacacccccttgtagtatggatcgtaaaatcaaggggggagggaaggtgtaattatccccatatctcagggggtgtacacccctttgtggtaaagtttgtaatatccagggatattacagggatattatccccaaattaatacttttataatttcttatgcctgcctttactgcaatctctgaacataaattgtgaagatttcatggacatttatcacttccccaatcaatacttttataatttcctatgcctgtctttactttaatctcttaatctcatcatctttgtgagctgaggatgtatgtcgcctcaggaccctgtgatgattgcattaactccacaaattgtttataaaacatgtgtatttgaacaatatgaaatctgggcaccctgaaaaagaacaggataagagcgatgttcagcgaacaagggagataagcataaggtctgactgcctgtggggctgggcagaacagagtcacatttttcttattgcagaaaatgagtaggagaaatatcactgggaagggaacgcattcctaggggaggcctatggacggccgctctgggggtgtatcccttatgtggttgaagataagggatgaaatacaccctggtcccctgcagtgccctcaggcttgctaggattagaaattccagcctggcgaattctagtcagaccagttctctgctcttgaaccccgtttcctgttaagatgtttatcaatgacaatgcgtgcacagcaggacatggaacctcaatagtaattccattttctccctggccttgtgaccttgctaggcccttctgcccttgtgatcttttattgccatttgaagcatgtgatctctgtgacccactccctattcgtatccccctccccttttgaagtccctaataaaaacttgctggttttgcagatcaggtggtcatcacagaacctgccgatatgtgatgtcaccccggaggctcagctgtaaaatttctctttcgtactctttcactttatttctcagaccaggtgacacttaaggaaaatagaaaagaacctactttgaaatattgggggctagttcccccaatagacattgttcctaatatccagaaaaaaagaagatgatattactcccaatatcacaggggttgtgaaccccacctgtgatatggttcctaatatccaggaagggagagaatgatattactctccatattgcagggggtgtgcacatccctgtgatattgttcctaatatccaggggaggagagggtgatattactcccaatattgcaagggttgtaaactccaccctgtaatattgctcctaatatttaggatttagggggggagaggataatattactcccaatatcgcaggggatgtatatgccctctttgatattgttcctaatatccagggggggagaggataatattactttccatatcacaaagagtgttcacccccctgtgatattgttcctaatatccaaaaaggaagaggatgatatcaatcccaatatcacaggaagtgtacaccccccccttttatattgtttctaatatccaggggaaatgagggtgatatttctctcaatatagcagaatgggtacactccccctgggatattattcctaatatccaggggaaaaaaagaggttgatattcttcccagtatagcagggaatgaatacaccctttgtgatattgcttctaatatcaaggggaaaagaggatgatatgactcccaatatcacaggggatgtaaacctgtggcgttgttgctaatatcaaggagggaagagtatgatattactcctaatgtcgccgaaggtgcacactttccctgtgatattgttcctaatatccaaaagggaagagaatgatattacccccagtattgcagggtgtacaccacccctgtgatattgctcctaatacccaggaaaaaagagaatgctattacccccaatatctaaggggacgtataccttccctgtgatattgtttctaatatccaagtggggagaggatggttttactctcaatattgcagggagtgtacactccccctgtgatactgtttctaatactcgggctgggagaaatagtattactcccaatatcgcagtgatattgtttccctgtgatattgtttctaatatctagtgggggagataattatattactaccccatacacaggggagggtgtacattcccctgtgatattgtttgtaatatccagggaaggagaggatgttactcccaatatcacaggggttgtacaccccttttttgatattgttcctaatatctggggggcagagaattatattactgtcaatatcacagagtgtgtacaccccctctgttatattactctttatattcagggcggtagaggatgatattactccctatatcacagggggtgttcacccctcctgtgatattgtttataatatctaaggggaaagaggatgatatcactctcaatatcaaaggaaatgtacacctttcctgtgatattgtttttattatataggggggcagaggatgatattaagaacaataccacaggggatgtacacccacgtattgatattgtccctaatatgtatggggaaagaggacagtgtaactcccgatatcgcagagtgtgtacacccccttgtgatattgtttctgatatacacggggagaaaagataatatttcttccaaaattgcagggggtgtacaaccccctgtgatattgtttttaatatccagtgggggagagaatattactcccaatattgcagggcgtgtacacaacccctgtgatattgttcctaatatccagagtaggggaggatgacattactttcaatatcgcaaggggtgtacattcccctgtgatattgctcctaatatccatgaggggagaggatgatattattcctaatatggcaggggctgtacaccttccctgtgatattgtttctaacatccagtgggggagaaaatgatattactccctatatcacagaaggtgtacactttccctgtgatattgttcctaatatccagaaggggagaggataatattactcccaatatcgcaggaagcttacaactcccctgtgatattgtttctaatatccagggaggtagggatgatattactcccaatatcgcaggggatgtacactcccccgtgacattgtttctaataaccagggggtgagaggatgatattacgcttaataccgaagggggtgtacacacccttgtgatattgtgcctaatagccagggggaagaaaattatattaattttaatatttatggggaaaaaggatgatattactcccaatatcacaggggctgtacaccgaccttttgatattgtttttaatatccagaagagaagaggataatattgctcccaatatcagaaaaggtgtaaaccccttctgtgatattggtcctaatatccagggagggagagaataatattactaccaatatcacagaaggtgcccacccccaaggtgatattgctcctaatatccaaagataatagggtgatgttactcccaatatcacaggaggtgttcacaccccttgtgatattgtttctaacgtacagggaagggagaggatgatattattcccaatatcacaggaggtgtatactcctctgtgatattgattttaatattcggggggaaaggatgatattactccctatatcgcagagggtgtacaccctctgtaatattgatcctaatatccagggcgggataggatgatattactcccaatatcgcagaaagtctacacaacccccagtaatattgtttttactatccagggggaagaggatgacattactcccaatttcacagagtgtgtacactcaccatttgatattgtttctaatatctagggggagagaatatattactcccaatatcacaggaattgtacaccacctctgtgacattcttgtgaatatccggggaaaaagagaataatattactcccaatattgcagagcgtgtacacccctccatgatatcgatactaatatttttttaaagaggatgatattactcccattgtcacaggatgtgtacaccccccttgtgaaattgttcataatattctggggggagagcataatattactccccatatcgaaaaaggtgtccaccctccttataatatggttcctaatatccaggatattacttaatccaggatacttgtaataccctaaatatacaattgcttgaacctccacctcccaggttcaagcaattcttctgcctcagcctcccgagtagctgggactacaggggcacaccaccacacccagctaatttttttttcttgtatttttagtagagatggggttttgccatattggccaggctggtctcaaactcctgaccttgtgatctgcccacctcagcctcccaaagtgctgggattataggcgtgacccaccgtgccaagccaggaagaggatgctctatagatttccccaataagagatggctttgcagggccattccaaaatatgtcaaagaaatacatttggggataaaatactttgatttcctttagggaatgttatctattatgtgatgctataccagagtcaggttggagtcggttatcttattgcaacaaagagtctgttccgtcactgttgggatctctattttttcctcttatttcttgagacagggtctcactctgtcacccagtctggagtgcagtggtgcgatcttcattcactgaaacctctgcctcctgtgttcaggtgattctcgtgcctcagccccttaagtaactaggattacaggtgtgcgccaccacacccagctaatttttgtattttcagtagagatggtattttgccctgttggccaggctggtcttgaactcctggcctcgtgtcatctgcccacctcgacctcccaaagtgctgggactgcaaatgtgagctattgtgcccagccaggatctctgttttaatgttagtgctggtcactttgcatgaactccaaagggaagaaatataatgaggtgtgtctgaccccctgccttctcatcgtgacctgaattagtttttcaggtttgcaggggatacccttggacaagaaggggctctattcggttggttggggggattagaattttactttttgtttacaatatttctcctgaaagagttaggggctcacaaggaatttccgcgtgagcaacttatgaggaaagccatctgggaagatatgtgtccttgtgtcactgggatattctcgtttaccccaatgatacggcaatgacgcagggttgtgaaattacagctatgtgtttggggaaaaaagaaagcaggattgtgtgactacgtttccaaacttcacttgcccttagccatagtgagttgggggcctggagattctgttttctttcacaatgatatagatacaattaaatgtatagaaagcaaaaaaataaaaaggtgagtaatgaggaacctctgattcctgagtggccatgtagttacccatggcacagagccacagttactgaaggtaaagtttgctggggaatttagaaatgaatccagctcttggaggagtcagtttactggatgcctaagaaaatgcaaacaaaataagaaaaaagggtaatattcaatcccatagttattgttacctgtcatagctaaagtaaaattaaaacagagtgctggcttcaatcttgatgctacactaagcttagatttcagtgaatgtgagtctcagccactagctcagagccacctcccaaagaccaaatcatgtagggacaatagaaagtacttctgagaattgtggttaccaagaacctagtaactgttggggaggagcaaaacaaagtacagaaaccagagggtacaatctgagtgagactgctatcagcttctggaggagcctttactaaaatgaatgatgagagtaactggatgatgagagtaactaatggatgatgagagtaagcaatgtctttggttttcttttttttttttttttttttttagcagacgtctcactcttgtcgcccaggctggagtgtaatggcatgatctcgcctcactgcaacctccacctcctgggttcaagcaattctcctgtctcagcctcccgagtagctgggactacaggcactcatcaccacacctggctaatttttgtatttttagtattttctggtgagggtccaggtttccggaaacaactcagagacatatgttaagatgttatctttagttttcacagggaaccaaatatgttacgactccaatttccttggctattgttttaagttaccattaccttctcgttgatcaagttgctcatttacttctcaagcctagctagatgcctggaatttcccttgaaggaagtcaagattttcctttatctccatactggctgatggtgatcgagtaagcccctaagaggggtccctgctccatctcgagatgctgctagattctacagtgcctaataaacagctctcgcctggccgacaaagagctgcttgctctctggatagcaattccaaagtgaacagacaacatcctgtttggaagactgccactctgttagaagaagcatcaggaaaacctttcttttgagctatttataactaacagcaattgaccaagtatacttttgtgagtgaaactgacctttctccctgtaagaattctccaaaatttggaaactatttgtgagtatttttacttatggcaatataattattggcacaagctcaatcagattcggttttctttcgtaacaggaaccattggagatactcattactctttgaaggcttacagtggaatgaattcaaatacgacttatttgaggaattgaagttgactttatggagctgataagaatcttcttggagaaaaaaagactgggtatattttcaatatgctttccttttaaggtccctcacctgtggaaagtaaagaatgtcactttctgacaggctcaggaacctcaagttatgtagggatctcaagaagatgggggaattcacccagttcatacaggtgaaattgctgttgcaaagattatgaatatgagagaagtccagcatggctgacttcatctcgtgtctggcctcaggctggctgcccttgctcactcttgggcataggccaagctagccatgggaggaatttagtttatagtttaactttgaagcacggatgataatagtctctccctaaaatgaaccccttccttgctcagggactgaaactacctttgtatgacaaatgaaagcccacaagattaagattatgagaggggcctgaattctgctaaaatgcaggtgtagctgactgataacaagtcattgtcccacagcttgcctttctataatctcttgcttctcaggagtcacatggccagaggtcctgagatttccagtcctgtgacccccacccagagatggacttagtgcatgaggaccattttccacacccctatgatttcatcctcaaacaatcagcagcaaccattccctagccccctgccttccaaattatccataaaaatcctagcctctgagttattagggagattgattaataatcccagtcctaccccttgggttgctctgatttaattaaaccttctctactgcaataccacggactcagtaaattggttttgtctgtgcaatgggcaagaagaacatgttgcatggttatacaggtactacaagcacagtctgatggcaaattattggttttgcttcctgcccttgatgtttctaaacatctagtccaaaattacttgtgaaaggtccagcaaagccaattttaaaagaggctatatggccaatcactattctttctacacattattgcaaataatcaggccacggctgggcacggtggctcatgcctgcaatcccagcactttgggaggctgaggcaggatcacctgaaatcaggagttcaagaccagcctaggcaacatgataaaaccctgtctctactaaaaatacaaaattagccaggcatggtggcatgcacctgtaatcccagctacttgggagactgagggaggagaatcacttgaacctgggaggcagagattgcagtgagctgagatcacaccactgcactccagcctgggcaatagagtgagactttgtctcaaataataataataataatcagaccaagtataatgaaattaaaatttattttgcaaataaattggtcctactacaatttatccttcatagaaatgtggaaactgaagataaaaaaaattaggtttcagaagaaaactatactacacctgttattagattctagccctaaacattgtttttgaggtttttattatttacctgcaatttggtctaaattctgaattatttcctgactacaagtatccaaggaataaatgggttttctttttctttatgatagttttagttggcttctaatgcaacaacaatttttattgtaatcctgtgtgcattctattcctactattcaaattattaatgttatagatctttcattgtagtacttctgaattaaccaaaatcacagtattctgaagatgattctacaaagcctgctgtttctacaaaggctgctgatgatttctacaaagcctgctgtagtgttgctgtggcctctgcttaaaaaagtagaaaacacattgatgcagcatgttcaccccaacctccctgcctaaaggctcagggaccatcttggaagaggaaggcgcgtgagattgtaagagccgaattagggggatggagtgtggagaataaggacacttcatcttggatgctcacctgccaaattgacttctgatgaaagccagctccagaaatgtgcctacagttactactttcacctaaaccctgcccttagtcaaatccttctcttcttctaagcaatcaacttcaattccttgtataacccacagtataaaagggcttttataccattctatcctattgcatgtaagccttgggtctgggaggtaacagtgtgggattccaccatctcatctccctgccacccaaacatgcctgctcttctttaagcaatattaaatgtttgtacttcagaaatttgatttgtcagcctcttcttcagactctcagcttctttggcctttgggagtaaatttgcataggcctgctcaaaacaggatgttctgggggtttgggggtgttgttttgttttgttttttgttttgtttagagacagggtctcactctgtcacccaggttggagtgcagtggtgcaatcatggcacactgcagcctcaaactcctaggctcaagcaatccccccaccttggcctcccaaagttctgggattacaagcataagccaccatgcccagccctggacttttctttaaagacatttacacagtgtaggaattactgtgggtgcactgctcaggtccccttctccaggatgctcattcctacctcatagatgattttcctgcagagatttgacctcagctgaagggcagtcacctggtccaggtggttgctattcacctccttcctgagaacagccaacagccagggacacgctagcacagagatataagagcgaccaaggtgaggccccttctgtgctgcggtgcatgctccagagcctccctgggatcagacttaagagggtctccagccagatctggtcttcgctgctttcctcgagctccccagcgcactcctgcaatgcatcttttttttttttttttttttttttgagacggagtttcactcttgttgcccaggctggaatgcaatggcgcaatctcagctcaccacaacctctgcctcgcgggttcaagtgattctccttcctcagcctcccaagtacctgggattacaggcatgcaccaccacgcccagctaattttgtatttttagtagaaacgggtttctccatgttggtcaggctggtttcgaactcctgacctcagttgatcctcctgcctcagccttccaaagtgctgggattacaggtgtgagccactgtgcctggcccaatgcacctcttgaatcacctcctcatgctttgcttttagagaacatgatccccaacatgtgattccagcaaagattctagaaagccaaccgtgacaatcacttctgggtttagatgacccccccccaccacaagatggcagtgagcacctcatcacagaggtgctgatggtctgcagcaccgcgccaggccagaacgtgccttttacagaagaaaataacccagtagctgactaggatggtgaggagggctggtgagcactgcggtagtgagagggacactagcatcactgagatgcaagtgatggtcatttttcataggtcaaagctcaaagcaggggacagttacagggcagggcttcatagcaccagtgtgatgaaagtatctgggagtggctaaggccagcactatgccatgggaagcaaggtgggcctgaggaggaggcagcagcgtcagcctgcaacaagtgggggctgccctgcagagacctaagagtcatgttatagagcacagtgtctgtaaggccaagaagtgtggacagccaagtgtgtcaattactagacatactcaagaggagcaggaagggcagggcatggtggctcatgcctgtaatcccagctacttgggagactgaggaaggagaatcgcttgaacccgggaggtgaaaattgcaatgagccgagatttcgccactgcactccagcctgtgtgatgggagcgggactccatctcaaaacaaaaaaagaaaaaggaaaaagaaaaaaagaaaaacctaggtatacttctcaagcaaataaaaataatcaaaaccaatatcatgcccgggcacaaatttcatatatataacagatttaaatatatgagggtgattatcctctcatatctccatttttttttgtttttccatttttttctttactaaaaaaagttaatgccaatgacacacaatttttttttttttttttttttttgagatggagtctcacttcttcgccctggctggagtgcaatggcgtgatctcgactcactgcaaagtctgcctcctgggttcaagcaattctcctgcctcagcctcccaagtagctgggaccacaggagtgagccaccacacccagctaatttttgtatttttaatagagacggggtttcaccatattggccaggctggtctcaaactcctgatctcaaataatctgcccgcctcggcctcccaagattctgggattataggcgttgagccactgcgccccgcctatgtatgattttttttttaattttattttcataagtttttggggaacaggtggtattttgttacatgagtaatttctttagttgtgatttgtgagattttggttcacccatcaactgagaagtatacactgaacccaatttgtggtcttttatccctcacccccttcccaccctttcccccggagtccctgaagtccattgtatcattcttatgcctttgcatcttcatagcttagctcttgaacccttactttctgtttgagggagaagacatatcatctacaagtagatactgtgtaaacattccattgcatgactatcccataacttatttattatttgtgtttggttatttgctgctatgtaacaaccccactcccaactaaatggtgtgacaattccatgattctgtggatcaaaaattctgaaaagtcaaacccaaggagttttgtctctgctccatgatgctaaagcctccgcaggggtgaggcgaatggctcagggtgactgaaaagctcagggttggaacagctggggatgaggcctctatgtataagatgattcttcactcacaggtctgaaactatggtggggacagccagaaggctcggctcagctgggacagtcacctgagccctacacatgacctctccaacatggtgatcctgaagcagttgggtttcttacacagcatcacacttttcttttttttttttttttttgagatgaaatattgctctatcacccaggctggagtgcagtggcacgatctcagctcactgcagcctccgcctaccaggttcaagcgattctcctgctccagcctcccaagttgctgggattgcaggcgcctgccaccaagcccagctaatttttgtatttttagtagagacggggtttcaccttgttggccaggctagtcttgacctcttgacctcaggcgatccgcctgcctcggcctcccaaagtgctgggattacaggcatgagccaccgcgcccggccaaagctcacacttcttatgattcagccttagatgtcacatcagttcattttccccacacttattagtgttagaagtcacaagcccacccatactcaggggactggcacacagaccccactctcaatggaaggggtgggacaccaccattcctgctgatgggcatttgggtaacttcctgtttgaagctattaagattgggctgctgtggccgggcgcagtggctcacgcctctaatcccagcactttgggaggccgaggcgggcggatcacgaagtcaggagatcgagaccatcctggctaacacggtgaaaccccgtctttactaaaaataccaaaaaaaaaaaaaattagctgggcatggtagcgggcgcctgtagtcccagctactcgggaggctgaggcaggagaacggcgtgaacccgggaggcggagcttgcagtgagccgagattgtgccactgcactccagcctaggcgacagagcaagactccgtctccaaaaaaaaaaaaaaagattgggctgctgtgactattctagtaggtgtctttggtgagcgcctacacgtgtttctctttttctctttagtatatgcccaggaggggaactgctggctcccagataccgtatgttcagggtcacacacacttccacagggttttccaaagcccttgtaccagcacgcactcccagcacctgtgtgactgctccagctgtcccacagtctcatcagttctattgctgatattttcattttagcttaagttatatttaataggaaaattaccgttgcctctgccccccgttcctgcctgtaggagtttctcgtagctgttgctacaggtggccacaaatctgtcacttaaacccacacaaattgatgtccttatggctttggagtcagaagtgtcaactgaaggtactagcagggctgtactgacctggtggcctcagggagcatctgtgctgcttctccaccttctagaggctgctgcatccctcgctccagccccttcctgacaccactcaccctcctacttctgttatcacatcctcaccttctctgtgttcagggctccctctgtctctctcttgcaagcacacttgggattccattgagggccacccacataacccaggagaatttctccacctcaatatccttaacaactgcagagcccttttgccataaaagttaccattcacgggttccagggattgtgacatgggtagctttaggagtgattattcctgcctgtctcccgctcaccagaacttggactttctctctcaacaggagccccctgtgtgggaatagcctgtctcaacgacgccctctataaggacctgcttcctcaaaggacctcatagtcgggtcctgcccctcagtgtccagtctgccttggctggaggggctgcaggggtgtgttggcgccacctggtggagacagggcatcacagcaggtgggagcccagtagaagcacaaccaaaacatgggtaatgtttaaaattttctggctaagcgctgtggctcacgcctgtaattccagcactttgggaggccgaggtgggtggatcacatgaggacgggagtttgagaccagcctggccaacatggtgaaacatcccctctactaaaaaatacagaaaaattagctggacatgtggcgcgctcctgtaatcccagctactcgagaggctgagacacgagaatcgcttcaaccccggaggggttgccgagatcgcgccactgcactccaggctgggcgatagagcgagactctgtctcaaaaaaaaaaaaagaagaggggaggcgaggggaggggaggggaaaagggggaatttgtttggagctgagacatccatcttctcctgacctcagatatttgcactcctggttatgaagccttcacacttggactgaatacaccaccagctttcccgatttccagcgtgcaaatggcagatcgtgagacttctcagcttccataattacatgagccaatttatatatataaattgggtcctccagaaaaacagaataaattatatatataattatacgcataacttaattaaattatacgtataacttagctatatatataatttattctgtttttctgaagaaccctactgacacaaatgttgagcatcttttcatgtgcttattggcttaataacttgtacatcttctttggggaaatgtctattcaagttctttgcccattttgtaactgaactattaatatttgtctttacattgttgagttgtaaaagttccttatatattctagatactagagccttatcagatatatttctgcaactattttctcctaatatataggttgtgtttttattttctttttctttttttttttattgagacagtctcactctgtcacccaggctggagtgcagtggcatgatcttggctcactgcagactcgacctgccaggctcaagcaattctcccacttcagcctcctgagtagctgaggttataggcacttgccatcgcacccagctaatttttgtattttttagtagagccgaggtttcgccatgttgcctaggttggtcttgaactccctgcctcaaagcgatctgtcagcctcagtctccctaagtgctggaagtacaggtgtgagccacagtgcccggccatctattttcaatagtgttttttgatgtacacaggtttggaattttgataatgttcaattcatccatttttttttttttttttttggttctttctactggaccaccactcttgagccctctaatccaacctccacgcggcagccagagggagctctctaaatgtaattactctttccctgctccacctgctcaaaacagtgtcacatttgtgatttaaaacagtatttctcaaacctaatttgcaaacaaagcaggtggaactcttcttgtatgcacagcatctgatttggttggtctggcatgggtctgggagtgagcacacctaccaagcggctgctggggtaacttgcgttttccactgatgatttcagcaatgtttccggtcccacatgctcctccagaaccttgtactcccccatgaaaaggtggagtccatttccccttcctttatttatttttttgagacgaagtttcactcttgttgcccaggctggagcgcaatggcgtgatctcagctcaccgcaacctccgcctcctgggttcaagcaatgcttctacctcagcctcccgagtagctgggattacaggtatgtgccaccacgcccagctaattttgtatttttagtagagacggggtttctccatgtcggccaggctggtctcaaactcccgacctcaggtgatccgcccgcctcagcctcccaaagtgctgggattacaggcgggagccaccgcgcccggctatttccccttcctttgaacctgatcaggacttgacgatggcatcaacatggtgagagtgaccctgcatggcttatgaggctgggttacacaaggcgatgttgcttctgactggctccctctcaggatacatgcccttggaacccatcctctaagctccttgggagcccaacttagcccatgtggagacaagacagggagagaaacagaggcacccccagccctcagccagcatcaaccgccagacaggagagcaaatgcgccaacaatgattccagctgaagcctcagacagcgtggagcagagatgagggatccctgcagattgcagatgcgtgagcaaaatgcatgctgtcactgttttgaaacaacaatgtctgggggctgtttgttatgcagcaatagacagctgtaacaatgctgttactgctgtattccatgaatgactgcactttgagtagcagggggctagatcactagataagccccatggcttctgtgtatgctatttttctacttttatatccttttcattcactttttttttttttttttttgagacagagtctcactctgttgcccaggtgggagtgcagtggtgcaatcttggcggactgcaacctccacttcccgggttcaagcaattattgtgcctcagcctcctgagtagctgcgactatagatgcacccccatgcctggctagtttccgtatttttagtagagacggggttttgccatgttggccaggctgatctcagactcctgacctcaggtgatccacccaccttggcctcccaaagtgctgggattacaggcgtgaaccactgcacccagcctcattcactttctttacttggctcatttttccttgttgcctcaattctcctctaagatcactttcctgacatttcagcctgggcctgttgccttctctgggtcccctccgcctcctgtgcctcccccatctcagccttgatccctcagattatacttcctctgtccccaccctgaccatcttggctgtccctggatagggatgggtatcttctcccactggtctgggagatctggaaggacaggcctggaaaagacttggtcactgctggaaggagctcagttagtgtggtgctgaggacagtacgggtgaggctggccccttcacccaaactcccactctcttccatagatttcacctctgtggcccaggccataggattagggcaactccccttaaacatcgagtccatcctccaagctgtccttttttttttttttttttttttttttgagacagagtctcgctctgttgcccaggctggagtgcagtggcgcgatctcggctcactgcaagctccacctccagggttcactccattctcctgcctcagcctcccgagtagctgggactacaggagcctgccaccacacccggctaattttttgtatttttagttgagacggggtttcaccgtgttagtcaggatggtctcgatctcctgacctcgtgatccgcccgcctcggcctcccaaagtgctgggattacaggcgtgagccatcgcgcccggcctcatgctgttcttgaatagtgagcacctgttacaagtcgccccaccagcctctcacttgtacccccctcatctctttctccccaagagacagaggaccctggcacttgtgaagcatgacccagaccctggggccatggcatccaacatcctcattccccatgacccctactgtctagatgtagctgccaagagacccccagactccccgggcctctgtctagagtgccaagacagagagagaatgccctgccgcttgcatgctttgtggggtgtccttcccccttccctggctgctaggcgtgacttcaacgttctccccaacccccaaacagcagcactgacaccagctgcagacctggctcaggttagctaatgaggaccaggctggggatggagcctgaacccctaaaccccagtcctgtaccccaccctaatcctggggtctccactggacaaaacgaagcagcttggtttttcgttgttattgtttttgagatagagtatctctctgtctcccaggttggagtgcagtggcgtgatctcagctcactgcagcctccgcctcccgggttcaagtgattcttgtgccgcagcctccccagtagctgggattacaggcgcgtgccaccacacccagctaatttttgtatttttagtagagacagggtttcaccatgttggccaggctggtctgaaactcctgacctcaagtgatttcccagcctcggcctcccaaagtggaagcggcttatttttaaggagaaaactcccgtggaaaggaatcagcacctcctctgtcaacatttcacttctctgaaaagactctcacttccaacagaaagtgctttgtaacacaacaatgaggctgggcgaggtggctcatgcctgtaatcccagcactttgggaagctgaggcgagtggatcacgaggtcagaagttcgagaccagcctgaccaatatggtgaaaccccgtctctactaaaaatacaaaaattagttccgtgtggtggcgtgagcctgtaatcccagctactcaggaggctgaggcaggagaatggcttgaacccaggagatggaggttgcaatgagccgagatcacgccactgcactccagcctgggcaacagagtgagactccgtctcaaaaaaaaaaaaaaaagaatgagaacatatggacacagggaggggaacaatacacacaaacaaaatttagaaacaggtgaaaataattttagtaatatttttactaatactgatatgctcaaaatattattatttcaataagtaatctaaaaattattgagatgtcttatgttcttttcatcatactaagcctttaatatttggtgtgtattttacactcacagcacatctcaatttgcagtccccatgtttcaagcactaaataaccatgtgtgtccggtggctaccatactggacagcgttgatctgaaatcgcatctgtatgcatcaccagcatatttgcagagatccccatctcagcagcacacctgaggctcatctgcgaaagcacctgcaacttctctacaacctcccacatcacctccaaacacatcctcatgtcatctgcaaacacacccatagctcacaggccaatgcctaaatatcattgcaggcaccttcagagaaagcacttactaaaggggtatacttgattccacatctgctttgacctgcaaatctcccttctcctttacatacatttgcatctcatttgtatgtcaatctaaatccactggcagagcctcagatcatcatctcaaagtcaggtggatgtggggctgggcaggcctccaggtgttcctcctcctgcttcctctggggctcttgatcctcctcctcttccttgctgctctcctcctcctcctccaatatggtgaccagttcctcccgcagcgcccccatctccagccccaggctgcacagctgtcccagcagctggacatccactcggcgcaggttcccctgccagtaggaaggggacgtcacagggatgccaccccagagagcaaggggtctctccaggacctgggtgagagcaggtcccaactcatgtcctggccacagcgcctgggcagggtcctcactgtgcccatggaccctaactgccttcctgcttctcagagtgtctcttgatctctaactcttctctttgtctctccatttcattgtccctgacttctctctctctgtctcctccctctcttatctatatctgtccctgtttccctttgtctctgtccccatttattttttgtctttccatgcccctgtctctctgtctttatgtgttgccatttctctgcccctgcctttggctctctttctctcgcttgccctctctctgccctccccaactttctcaaattcagtctgtctctccatctctgttcctgctctccgtctctgcttcccacctctgtccctctcttttgggatctccctgtccccacctctgttcccgtccctcactctatgtctgtctctcggtgtctgtacatgcctctcatgtctctgcttctatctctcagattctgtttttcgatctctggccttctctatttttgttcatttccattcattctcatttcctctctttctctttcccttccaaacccctcactcaccagctcctccctgatccacagcagactatcgcaggcacctccagtgtctgcccctgcagtcctgagggtctgaccagggatttccactggggagacctccctcagggcctgggggggtgggcccagccccggaggcaccagtccagcctgattcagctgcctccacagttccatcgtctctgagctatggctgcaaggagcaggaagtagcaaggtccagggtggcctggtcccctggggagctgtgtgcgtggtggagagtaaagggcagagggagtgggatgggggttcctgggaaaggtatcccaaagtccactcttcagagagaatcagctggccttgtgcttttctttttccttctgaagtctaacctcaactctgctcacagggttcaaacatagcctcttgcagaggtctaactccacccttccctgcctgtctcaggcctgacccctcaggggcgctcagtgtctgtagatgcctggcaccctctgtccttccacctgccccccaccaccacttctccagcctctcctcagcctccatttgacctctggcttgcccatagcttggtccttgcttgtcctcttggcacgggtcatcctagggctttcccaccagtgtgcctttgggggcaggaatggctcccaggggcaccaagacagcaatcccttagctggagtgcctgtgtccaggctgctggcctagggccaagcagccaattctgctgaccctggacttgcctatgggtatattatccctgttgagggtgagggcttctgctgtggaaaagtctgggaagcactgcaggcctctctcggccttggacccttccttcagacccaaggtgcatatatatacatatatataatggtagatcacgaggtcaggagatcaagaccatcctggccacatggtgaaaccccgtctctagtaaaacacaaaaaattagccgggcatgctgccgcgtgcctgtagtcccagctactcgggaggctgaggcaggagaatggtgtgaacccaggaggtggaggttgcagtaagccaagatcacgccactgcattccagcctggcgacagagcaagactccatcttaaaataaacaaatgaacaatatatatatatatgtattttgttttttgagacagagtctcgctctgtcatccaggctggactgcagtggtgcaatcttggctcactgcaacctccgcctcccgggttcaagcgattcccctgcctcagcctcctgaacagctggggttacaggtgcacgccaccacacctggcgaatttttgtatgtttagtggagacggggtttcaccatgttagccaggctggtctcaaacccctgacctcaggtgatctgcccacctcggcctcccaaagtgctgggattacaggcgtgagccaacgcgcccagccccaagtcccttttaccatagaaagtaacatagtcacagtgcccagggattcacaggtatggggagagggttcgttattcagctgccacacccaccttcctaaacctgctgcccttccagtttcctcacgtgcacagccacgcccgtctgcttttagtttctcaatctgttggcttaaccttcaaaacaggcccaggatttgagcacttctcaccattccctctgccccatccccattcatctcttgcctagactgctacagcagcctcttttactggtcccctgcatccacccttgccctctaaggcaagggtccccagtccctgggccaaggaccagtaccagcccctcgcctgctaggaactgggccgcacagcaagagatgagcagcgggtaagtgagcattaccgcctgagctccgcctcctgtcacatcagcagtggcattagattctcataggaggcaaaccctattgtgaactgtgcgtgcgggggatctaggttgcctgctccttatgagaatctaatgcctgatgatctcaggtggaacagtttcatcccaaaaccatccccaccccacccccgacccccagtctatggaaaaattgtcctccacgaaaccagtccctggtaacaaaacggttagggaccgctgctctaaggtacattctccacctggcagaaataatctttacaaaatgtaaatccgattttgacactcccttcttcccactgtgaatagaataaaaccctaccaggcctgcaccgtcagcccctgcccacctctcaacccagtctcctatctctgtctgcaagctggttcccacctcaaggcctctctgctctagaggctacctctccctgcagcgcttttcccctagatctttgaatggctctttccttatcattcacttctacttcaatgtcacctcttcagagaggcctttgctgatggccctacacccagtcacttttttttatctgcttctcatcaaaattgccttgctgattcctttgtttcttattcatcctctcccacatccatcctctcccagcccagaatgttgacttcctgagagagggactgggtctgtcctgctcaccatggtaacctcggcatctagaacagtgcctgccatcacgtggtaggtgctcagtaaatattcttggaactaatgaatgaataattctatccacaagacttcacaatggctcttcatgctgcgatctagctttcaactccaaactggtcttgagatctcacctcagtctctaaccttgacatctaacctcttcacccactctcttacctgaccctaatttttaaaaatgacgtggtcagcttttcagccccctcattccctgtttttaggaggtagtgagtggaagctggaagaataagaaagcttggggagactgcaattgcagtcaggaaagaaaggtactctgccgggaagaacaccccatcttctcctagggaaagattgtggagtcctggggtttgttttgtttttcaattttttgttttaagagacagcgtctcgctctgtcacccaggctggagtgcagtggcgcaatcacagctcactgcaacttcgacctccccggctcaagtgatccccccgcctcagcctcgtgagtagctgggaccacaggcgtgcaccaccacgcccggctaacattttattttttgtggatataaggttgccctatttctttgtggagataaaggctcccctatgttgcccaggctggtctcgaactcctggcttcaagcgatgctttcgcctcggcctccacaaagtgctgggttcacaggtgcgtgagcccgacctgtgtctcgttttgaagctcagggagagggcgctgtgagcaatccctaaaccctttaagagtaaaaagtgcgtgcacctttaagaggacggttagaaaacgcggggcgtggccacaggagaataagttcgcgctgaaccaggagcgtgggataagaccggccccttccggttacgaaaccttagcaagatggcggctccctgggcgtccctgcgcctggtcgcccccatgtggaatgggcgtatcaggggcatccatcgcctgggtgcggcagtggccccagagggcaatcagaagaagaaaaggacaatactccagttcctgaccaactatttctacgatgtggaggctctgagggattacttgctccaaagggagatgtacaaggtgcatgagaaaaatcggtttcgagacaaggagtggatcaggccagataagtatggccatttctctcaggagttctggaatttctgtgaagtgcctgtcgaagctgtggatgccggtgactgtgacatcaactacgagggcctggataacctcctccgcctgaaggagctccagtccttgtcgctgcagcgctgctgccacgtggacgactggtgtctcagccgcctctacccactggccgactcgttgcaggagctctcgctggccggttgcccccgcatctccgaacggggcctcgcctgcctccaccacctccagaacctccgcaggctggacatctcggacctccctgccgtgtccaaccctggcctcactcagatattggtggaggagatgctgcccaattgcgaggttgtgggagtcgactgggctgagggcctgaagtcagggccggaggagcagcctcgggacacagccagccctgtccctgcctagcctttagccctgtccccactcacgtggcttctcagcgggctgcatggaatgtctggtagctcaccacacttctggcttccatttgtcttcactcaacgtcagggtgggggagtggtgctggccaatcacaggagagagcgtgagttcccagtatttattcctggctgcccttggctaaaggtcacagctcctgtcaccctgtcaggcagccctttccatgcccctgttcaggcctggggaggtaaaggctcaggctgttagtagccgcagagagccacactcaccttgtcaggagactcttctcaaactgtccttatgtgagtgcactgccatttcttgcagggaccctgactgacacaggggctactactgacactttacagggatggttctcccccgtgcagggccgctgtgcccactgcaggacatgcagcatccttcgccccactccactcactaaaggccagcgcaccccaggccccatagtattgctggttatggatttattgactttatgttccaaattcagctttttcagttggctgttttttgaaaggggataagctttgtcagtagagggcaccgaacaggcattataggaggaaaggcgcctccttcgtggttcttgttggttgtgcttctgcctctggacgccgcagtgcatgtggcttccccagcacccagctcctgaagcaccaggcggtcagcagctgcccttggcaccctccagccctcagaagttgcgtaggagacacagcgcctccactgaggcacctctctgggaataacgttccccagcaccccaaatggatttccagtcaattcagaagcattttaccagtgaagccctcattattccagttcactgttaaagccagtaattctctatattaaactttccctgttcggtttatggagtataaaccgaacagggtcttgggaagggacagtgtctaagtgtctgggtgccatccagagcatttggcaggggcagctgcaggatgagtgtgttcccaggggagtgagagcagcagctatatggcacttgtttgctactgccctctttttttctttttgccaaacctgaggtgactagtgtcacaggtggagcccatctcaca

SEQ ID NO: 735323 - DNA, 188340 bp, Homo sapiens
ctccaaggctgagggatgaggagacctgctgaggacccagggccttatctttccatcccactccataggtcccagtattgactgatgctgtcttcacctcctagcctcacttttaaccttctggcacccgcccaccactgtccagttcactattgaagccctgccgtccagtgctgcagagggaaaggatgttcttctactggcctgcaatatttcagaaactattcaagcctattattggcacaaggggaaaacggcagaagggagccctctcattgctggttatataacagacattcaagcaaatatcccaggggccgcatacagtggtcgagagacagtataccccaatggatccctgctgttccaaaacatcaccctggaggacgcaggatcctacaccctacgaaccataaatgccagttacgactctgaccaagcaactggccagctccacgtacaccgtgagtgattcccccatacctctgggtgctggcggtcagttctgcttcacacacatgagattgtcaggcctgggctgtgcctgcatccccctctgcattttgtcccgtgttgagatttgggcatttagtgcaggacacacacatggtaggtaaacttcaacagatcagaattcctttcctgcatccaggccctgcagacactgatggcgggggcgggggggcctcagcagggggaggtcagtctcagccaagcaccccatgccctccccatgaacctgaccctgagaaagaccctggagaactgggtcagggcctggcctgagggcgtcctgggaacctcacaaaagcccagcctcaggactcctgactccgtgtgaccccgggaagcctgtgtcagggctggggtgtggtctcctgggcagggcttactgggagcaaggatttaccagatgtctgcgggctgtggttcctgaagcttctcatcagtgagggctcagctcccagagtctcatctagacaaggacagagcctaccactttccctgggactcagcctggagagggcagggggacaggattactagggcattggccccctgaatgaggagcttaagagatgcccttgggcagtcagtggcccaggggtaggaacagaggggagaaaatgttcctggcagcttcttgtccaccggggatcatgcccaggggtgctctcccatggaggcaaataacagatgctgttgatgtgaacacctcctctgtgccaagcttcatgtcagatcctgtgaataatttaaagttcattcacagacaaagtggcaagcctcagaccattttccatttacatattgtatggaggggaaactgaggcacagagagatacagacaccggccacggtgggcagatcgcagctggcagagtcacatgagggctgtctgcagctgctgccacgtcctctccttcatccctggtgccttactaggtgtctgtggaccttagaacagccactggttcggatgttttcttcttaggtgtctacagctcggagggggagattctggtctggagagttatgagtaaatacagaattaatcagttttttcttaactaaatcacctgcctcaacaatcagtcagtgctggggaagttcaggcctcctcgctcaggtccacaccccgcatctctggacatgaaatggcttcgtgtgttttctgatgtgtgggtatcattccaacaggaggataaaggggaggactttgctttctctccccattcacaccctgcaccagccagggcccagtgtgagacacatactccgtagttctctcatgaaggagggagggaatgaatgaaggaatgatctataacctcttcagagacagagacctggatacaagatcctaggaggttctgggcccaacgtgagacacacactctgtagttctcttatgaaggagggagggattgaatgtaggaatgatctataacctcttcagagacagagatgtggatacaagatcctaggaggttctggccacacctgttttctgtccctctagagcctaagacccatgtctcattcatctggcccgtttctcctaaatctgcccctgggagctgagtctcatctgaccctggggctgcagggctgtgggaaggttttcaggggagggatcaggcttgcgggtagtcccacacgtttgccttacaccctggagctctacctggttctcactatgaatatcccataataatcccccctatcctttctggggagtagaaaaaaagtaaatatttaaaaatatgccagagcatctgttcttcttagcaagttcagatagttattagttagcaggaataaatcgttattttaccagagcctcacctgctgggggtttatgggagcctaactgactgaggggggtgggaaatatccaactccagccccctctagccatcatgtcccacctaaaggagagaaaaaactgagaggcacttgtgacattcacagcccagggcacagactctatccaggaccacagaacccctccctccccccactcaccaccgcatcactgaacgcctgctcacccaagttcctgttgcccagtacatcatgtcctggctttcaacaaaaactacaagacagactagaggcaaaaaaaaaaaaaaaaaaaatgcagttcgaaagacagaacaagcatcagaaccagatgcagatgtggcagggatgtggcagggatgttgaaattatcagaccaggaatttaaaacaactctggggccaggagcggtggctcatgcctgtaatcccagcatttgggaggccgaggcaggcagatcacctgaggtcaggagttcgataccagcctggccaacatggcaaaaccccgtctctactaaaaatacaaaaaattaggcaggcatggtggtgggtgcctgtaatcctagatactcggaaggctgaggcaggagaattgcttgaacctgtgaagcggaggttgcggtgagcctagattgtgccactgcactccagcctgggcaacagagcgagattccatctctaaaacaaacaaacaaaaaacaatactggctaatatgctaaaggctgcaatggaaagcatagacaatgtgcagaacagacggatgctgtgagcagagagatggacaggctaagaaagaataacaacagctactatatctatctatctatctatctatctatctatctatctatctatctatctatatatatgtatatatatgctagagatcaaactcactgtaacacctggatctcagagtggttgtgaggatgtttattaggagattaaagagattaaagcagagttatacacagggcgagagctcaactgatgctatcaactagtattcttatttttttgatgttgttattggcaataaaatcaggaacaatgcagtaaaaatttggttttatcatgtacgagttctgtgaccttccttgacttactgaggtactgtaagtctcagattctaactctgcagatggcggtgatgcccctctccctcaaggtgatgtgaggatgagatgagctgtaggtaggttggtgcccactgtgcctggcacatggaaggcccctgaaaatagtcaatgaacatcatccccgctcatcagcatggagttgacagtgagggctcgctctctgtgacaatcatggaatggaaaagaagaaacaagaggaagactgggcgcagtggctcatgcctgtaatcccagcactttgggaggccgaggcgggcagatcatctgaggtcaggagttcaagaccagcctggacaacatggcgaaatttcatctctactaaaaatataaaaattagcctggcatggtggcacaaacctgtaatcccagctacttgggaggctgaggcaagagaatcgcttgaacttgggagatggaggttgcagtgagccgagattgcgtcagtgcactccagtctgggtgacagagcaagactccatccaaaaaaaaaagaaaaagaaaaaagcaacagagggaagaggtgtgacatgagaggaagaagggatttaaaggtacaggagcagggcgaggtgcaagcacctgtgggagaatgtaggagttggtacatcccagtgtgtcaagtctgagacacagaaaatggtgcaaccgtggagagcaagggagtcagctatgaggacagcccaacagaccacactcaggctctggagcatttccttcctccctgactatgcccctgccctgcaatgccccttatggtttcccttggaacaaacttgggccttgtcccctttgccttcccctttctgcagaaaacaacgtcccaggccttcctgtgggggccgtcgctggcatcgtgactggggtcctggttggggtggctctggtggccgccctggtgtgttttctgcttctctccaggactggaaggtaccgcagcttttccccagcctcctcccacccctaggctgaccccagtcagggaggagggagaccccgccctgtattcagggccaggctttccgcatcctcccaaggaatccttccctctcattccatggctcctcccttgccagctgctgatcctaggctgcctcttcctttatgaatgtggcacagttaaggttgcacccctgagtgctgtcctagttccctaacacagcaaagccacagctgcctggagggaggaagggagggagggagggagggagataagacgggagtgctcagaacctggtaccttctgctgttcattgaatttacccacccagtgaggagggatttgcaggcttgagatccatggtgggggtcctgggcatggtcacgcagtggggagtggcaaagcctggacaggctgggtagggtcagcaccccatcgtgattgatgtccctgaggtgtgagatgggagaacctggacctcaggacctgctgtcctttatgtctcttgccaaggggtggagagagagaggacaaggccattgccccatttcagcatctccaggcctgaaaggagggtctggccatggcagggatactgagttctgggagaatatgatacatgctccttgcctccccatgcccccagctcccccagtgtcctgcacacacagccggccctgctttccctctggggccttgacccttcctctcaggcaaacgcaggtggtctgattccctccctgagtcctcagtccctttcctgggtccctgggtcaatgttctcctcacccggcatctgcctgggggggtccttcctctctggccaggacagacgtgactgcttaaggcctatcctcagctccccgtcctcggccgctcctaccacgaaactgatggagacaggaggccttcactccagtccttgaaaatggagtcccttccttgtcctttattctgcccctaaacctgtgatttctccctgcaccctcatgaataatcctgacctttcctagggccagcatccagcgtgacctcagggagcagccgcccccagcctccacccctggtgagtgtcccttcagcccaggtgtgggagcccctaggcctgccctacggtgtccactcctgccagtcaccccctgggggcctctgaccctttctttggggctgcaaggaggatgtcaggaaacatgacacaggggaccccgactgtcttgttcagactgatctgtgggctctgggtcgtgggtcacctcctcgacctcagctgctcaggtctcccctgggaagaggctccctctccctgattctctgggagctgaggacccctacactctcctgcaggaggggcccaggctctcctcccaccctgctgctcactcctgtctctgtccccaggccatggtccctctcacagatccaccttctcggtaagcctgttccctccccagcccttttctactggggtcccaacagtgcaggctcagggcagggggaccatcaaccccacagcacagcactgacccacctttccccagaacagtcaggtcaaagtgagtgcctccagccaggatccgggcctctctacagggccaggaccacccacgccatgtgctgacccctccccgggaccctctacacctgaggagaaccctggagtccagcaggtgcagaatggacactgggaccatcagtcagaggcccacattaacaagggtgcggggtgggcccagccaggacaggggtcagggtgttgtgtccacactgggaggctgagctcaggggcagagctggtcaatcctgaggggaaatgagtggaagtggaggcagggaagtaagtcctggccgatcagagacaggaaccttccaggctgggcttccgtgaccctccctccctgtcccctgacatctcctctctcccctgcccaggcccctctacccagccccagaacagccactcccatctatgaggtgagtgtgggccatggatgttctggtcccgcaggctccaggggacccaggatctgcccccaccagcacctggctgagctcagattcaggaaaatgcagtgaaaatgagaacaggtggtggtgagcagaggagggaggggcctgggaacagggaccccctgagcacagccaggttcagccccagagaagccctgggtgggcccagagcctgggagatgccagacactgttctgagaaggctacaggggttgaggcctcttctctgtttttacaggaattgctatactctgatgcaaacatttactgccagatcgaccacaaagcagatgtggtctcttaggttcctctgggagctgctcttgtgggttgatggagcgtccccaaagctcccagccctggggacggggaaggacatggagcctgagccagagaaccagctctgagtcctgaggagacacaggcctggggacagggagggatgggagtccctgctgaatatctggagaccctgacaggttgccctgggctctgggtgggccgggacaaaggcctctcatcaccacaggaagcgggggcttgcaaggaaagtgaatgggcctgtggcccacccggggtcaccaggaaaggatctgaataaagaggacccttcctctcattggctctttttctgctcacgggaacttagcagaaactcacctgaaactccgtgtccattctctcccgggtcacacagggaaaatatctccaccttgtctcaaccacagtctctcttccctgggaggcagaaataggggttgggagtcaggctggggtgggccctacacaggaaagggcaagattcacatgagccctgcccagccagccgagcgctcagctgtcctcacactaccccagggaccaaggccatgcacagccccagcctgggtccctctgtgaatgcatgtggggtctcaggagcacagaagatggggccatctgatgtccacaaaaggtgagcaatgcgggagcaaccatgggtggtataggttgcggctgtggcccctacgcagcctccagtgtcctgacccctgctgccctcttcacccaggccctggaggcccagtctatcactgtcctccacaaatgaacttacctgtccccaaatccaggatcctgtgtgcttatacctggccactaggttctcctctgtcccagtggctactgctcaggacatctttatccctggtggggcacagagaggggctgtcagagcaaccaagattaatacagacgcataattcagtccttgagcactacccaggactctggcccctcattgctcatcagttcccactttaccccctggcatggatctcactgagcaagccaactctttacacaggagcatccaggtcagaggtgcaggactcccccatctaaagctcatgcaggctcccatggcgatgggacaacctgtctgctcctctccctggcccacagccctatctcgcctgcagctcctccacacacctgggacagcagttctcagcccttccctgagggcccctggaagggtgatgatctcatataggttcacttgaaccaggtgccaccttcccacaagtgagctggtgcctgcactaaagcacagagccacagttcccaagagtgttctgccactgccacaggtcccaagagtgttctgccactgccacaggttgttcgtcctgagatgagaggtaagaaaacaacccgcaatgggttgttttatatcgggatttgcatcaggatttagctctaaatgacccctgatcccacctgcacacagcgtcagatgagacaaggtgaggcctctttagttttctgttgaggctgtgacaaattaccacaagcttagtgacatagaaacctgaaccaaagtgcccacatggctgtgttctttctagaggctccagggaagagtgcatttcctctccttttccacctcctagaggcctcctgcaaccttggctgtgtcctctttctccatcttcaaagccagcagcacagcatcttgaaactattctgtgccctgcttccatccccacatctccacctcctcccacctccctctctcacttaaaaggaaggagccttgtggttattttggacgcacctgggataaaccacaacaacctccccatctcatgatccttcctttaatctgtaaagtgtcctttaccacgtgacatgtccacagatctggggatgaggatgtacacatctttgagaggcccttgttctgtccatcactcctctcaaggccatcttctcatcatcgttcactacaaactacacatgggcacctggatgggttcatcatgactgtggcgtcagttcctgcattaacatccccagcaccctccagatcctgagagagggagacggagggctctccatgcccctagtacctctccaccttcttcttggtgacatgcttagttgctaagaataacagaaagcggaggtgactgaaagatcacaactcaccggcccttcaatagttcgtggacatcagcaccacggacagtgactcagtgaggctaatttccaggtggcagcagggagcatgcagataggagggaactgcaggaaaagctgcccattctattctatatgagaaagagtgtaagaaagaggaagctattacagggataatgctattcttctctaatccataaattgcgaaacctttgcatgtctggatatcatggtttttagcacatctgctgccactccctgcagggctgattgctgcatccaggatgtggtctcttggggggctcacagcctgctttggcctcatggtgagtctccctgcccctgacactcaggccactgtctctgcctacaacatggtgggaaccttccatgattaacgtctgattctctgtgcctgacctttgaagcacatccatcactcagcctggagcatccgctgagctcagcatcctgctcctccatccccagctgagcccttgaggagatgcttgagaggatctcctgggctcctctgtgagctcctccaggctgagccttgtgcttggtgtcagaggcctttgccatctgcttgttctttccataggcaaataatcctcctcagggacaagtggggcctgaagatctgtctgaatatctatctatctatctatctatctatctatctatctatctatctatcatctatctatatgtatgtatatatgagaatgctttattaggcaaaactgcatactatgaacatgctttaaaatgcaacaggatgagatgtgaagacataaagaacaagtgtgtagtgacacatggctatcagaacacactgaagaatccacaccgcggccgagagcagtggctcacgcctgtagtcccagcacttttggaggctgaggcaggcagatcacttgaggacaggtgttcgagaccagcctgaccaacatggtgaaaccccatctctactaaaaatacaaaaaatttagccgggcctggtggctcatgcctgtagtcctggctgttcgggaggctgaggcaggagaattgcctgaacctgggagacacaagttgcagtgagctgagatcgcaccactgcactccagcctgggagatagagtgaggctccatctaaaaacaaaacaaaacaaaaagaatccacactgcttccccgcttcactttacccagaaaaggaatgttctaggccacttcctcttcagcacacatccccagggaactaaaataggttcacagtcacccccatcttcctcattcccatcacctcttacccacagaggcatctctggtcctacagatccagccctgccttcaagaggcacaggtccaacccatccagtgtccctgctagtcacacacagcactcagggtacaatggagggcttctgtgctttggatgggaacaaaccccacctcacattcccacacctgagaagccaccagggtcctctctgtcctgtcctcacactcaatgtctgtcctgggtcacccttgtcatctctcctggaaataggcatggctcctgacaggtaggattgaggctttgtcttttcaggagtccctcccactctgagcacatgaaactgctcagctccatgcaaccctctctcaccaggggccttgttctctgggtccctgaatacctgggtccatgccatgtacattttaagaaaaatgacagtgactctcaccctgacatcctcacccaaggcacgtgtctgacaagaatcaccaggtgagatacctgtggctccacacacctgaggcttcactgcgcaggggtgtcctcatccctctcctcccacccctagggacagtaagcaccacaggctgccttggaccaccagctccccctcccagacacagcctcagatctatactgacatgctacatggagaggctctgatgaacagcaggtattaggaaatcccaccgaaccaggtgccacttgcggccccactcctcctcatatctgtgactgggacagacacacataacacacctctgttcaccgcccagcccccaaggtcaatcacagtctgcttctcccctagatccactgctccccatgtcttccgtcctcagctgcatcctgggtggcctccttgctgttcttgtaccccagaggcaggttccaacctttgtgatgttgcctgcaatgcccaaactttcccttccccttccccttcccttttcccctcccccttcccctccccttcccctccccacccctatcccttcgtcttcccttgtcttcccttcccttccctataaagccaaacatacccatccacctaccttgtggtcaaagtcatcagcctcctgctccactcagtgttctctgaccctgcatatggaggtggtggcccctcctagaacacccaccactcactgtcagccttgcgtggtaatcacagattttgcaggggttacctgtgttcaggtgtgtcacctgtggaaccagaactcttggaaggactggcagagggagctgcttaggatatctcagggctcctggcatctggtctaccacagggctattaacaacagcacttagggacaaggtggaggatggacggttaagagggtaaatatggatgatgtgtgggcaaagaataggacacaggaacacatgcagtactcaaataattatgccaagaaaggtgaggacatggagatggacattcccatatacttctgatgggactgcagtttagtccctacagcaacattgacctcatcatgtttaacgcgcacacgctctgaccactatcctacttctgaaggcctccctgtgctgtgagctctgagaaggccaagcttgcctgttctgtctctgctaaagccagagaccagccaatagcccagcacagggtacttcataaatacatgttgaaggaatgagctccaggaacagtactccacatggtagagatgtgtgtatgaggatgttcactgcagaaggtcatgtcaatgtgacaagtgacgagcagcctcaaatccagcaacaggggtgtgggtaaaagatcatagtgtagccatgcaatggaaccaatgaaaaaaccacaattagagcaaatccacatgtattaataaaggaggtgccctccatacatgctgcacctaacagaatgttgccaaataagaatgaaaaatgatgatatttgggctgtaaaaactagaagtcagctaaataagaatgcatcgaaagtatttgtgaatgcttacaattttataatgccttggcatccgttttggatggaagttggactttctcataccagaagcagggctcagtcacctttgaaatagtttccagttctccacctccttccagttcctcagtgtgattgatcagatatctgatttatacaactgcctcctggtgacctcctccctatgggacttccggatacagcccgtatgactgccccactgaccccacaccctgcctgctgcagtgaccacctctaattacctggatctcatgtctgcttgcattaaatccaccaattaaaactccctgaggacaatctgtttgaataatattctgtaccctaataaaggccttgacccatgggttccccctctgtcctccccatactgcccctgacctctgtgtgtgtgtgtgggtgtgggtgtatgtgtgtgtgtgtgtgtgtgtcctccagacagggcctgtatcccccaggacctgtaagtaataaatctttattttcatcttatgtctctcgcaatcattggcaagagctctgcatcttaaagatcgcaaatttaagaaattggtgtagtcggcacaatagagtacctcttctgtttagcacaagatatctcggagctgctgaggcttttaacatcctcgccggtgtggctgcctcactggtgaggccgttctgttcagtgcaattcagttgctccactgtgtgctgctgtgttgctgctgtagagtgctgccatgttgttctccccaaattgttaccgagtaggaacctgtaatgtgctcccaaggtggtctaccccatgagaagggggattctccatctagggcaagggctaggtgtgtttctggaatcctaatagggaaggcatccacagagggtgaactccactcctccttagagtgaggagtgacatttcccatttattttccccatggaggtgccatgtattgactttttctttcactgtcccaaggttgagccaaggtgagctatggagaccagggcaagataccatttctgttagcaaagcaaatgggtgacaacgtgtggagaagctgtggttctcctgatggatatagcagagtgccatttagtaaaatcttgtcaggaggctgcccctggttagaccggcagtgtctgtagtcactaaggtggatgcgaattttaggccctgggccatggataatccctgcagacacagccgtggcttcatgtgatggggcaatcccgggctagtggctcccttgtttctgcatttcttgctgtggttgcacaatcaacacctcaggggttgattgggtcaccttggaaagagaaacagctgcctaggaggctggtgcacatggaggccaccctcaattttattctgctaacaagttgtaagattaaaacaacagggggctttgggtaccatcaggaacttgtcaagtaaacatccaaagacagaaagaagaaaaagaaaaagacattaaccgtctagaaatacaagccattttaaagattttgcttaaaagatgcgcttgggctgggagcggtggctcacacctgtaatcccagcactttgggaggccaaggtgggtggatcgactgaggtcaggagttcaagaccagcctgaccaacatggtgaaacctcgcctctactaaaaatacaaaaaattagcagggcatggtggcaggtgcctgtaatcccagctacttgggtggagaatcgcttgaacccgggaggcagagacggcagtgagccaagatcgcaccactgtactccagtctgggcgacagagtgagacttcatctcaaaaaaaaaaaaaaaaaaaaaaaaaagacgggcttgtttcgtcgttgtggagtcatcccagagagaggctactccctagagtcactgaccacctttcctcctccatcttttcctcttatcattctagagacagaaaacaagaatctcagctttaggtggctaacctcaccccccaagaaaagaaactaccactttgattgactacaaatccaagaaaaataaaagagaaactttaaaaagtactgagcaaaccacaggtctagcaaacataatgctagccctaggttacttattcatttacaacaaacccctagatataggaggaaaaaataaaaggtaattaaatatatacacatacaatattttaatataaatatataataaatagttaaattatgtatgtataatatgtaactaaatcaaagtaaaatttcatactttgattctattggaaattcaaaattcatttattaacttatatattaaggaatttatgtaaaaaaagatttttaaaagggcaccaatttgcttttgtgtctctacaacataggatctaatttaactttacatttgctaaatacactaattgacaaatattcatggatttaatcaatactggggctcaaattgtagccacacgtgggaatcccataaatttaaacactctgtccctattatcttgagaagaaaactaaatataaaattgaaaaaaacaggtatgtctcaatttacctgtaactttgcctaaatttcccggagtcatatacccattgctgtaaaacattctctattggacataggtgctctgagacaataaataaaatagaagtgtttttggtacttagacattggcttgacaaaatgggatcccatgaaacctcagttaagatagtgaatacggcccaatgtgagttgaaatggggcctttaaggattaaaacttattacatgaaacctagtaagtaatggggtgattatccatactgcttctccatttcatagcccaattttgacagttgtcaaatctggaaaaaacaaacaaacaaacaaaaaaacccctgggaatctgttgcctcacagagacacaaagtagacatcaaaattgtatatctcagttccagttccaaaatggtggcatagaagcaagctggctttactccttcacacagaaaaccaaaaacaaatatacagcaccaaaattattaccagatatattccagaactcaaatatgaaaatgaaacagttttcagagccacagagaagtgaaaaaaactcccgacagatgacaaaagaatcagatttccccatctgtaatgtccctccctgccccattctgcctggtaccaggtgtgtggaaaattttaccccaactcatggtttctacactgggaaatgtaagatcaatgcgggcaaccagtttctgcacaatcctgggttccctgtccctgccttaacccacaagaagcattgtgagtgcccgaagggagaaatttccctgaggacagtcaaagagtggggaggcaggactaccatctccttccctggaaactctgctgtgtaactcagccaagggagacatgaaatcagactggtgtttcagcagctccatgttgtagtaggtttgtttcacaggtatcctgggcatggacatctagccagctttcccacactgccaggatatcccctttgggacctccctcagttaggaagggcacactctgatcatttactagggccaaggtaaaccctaaaggtaacttagagatgaaaaggaggtagtgacctagcagtaaagaactctaagaaaatctatccaataaaaatcaaaacaagccagacaaagactaaaataaataatgaatccttcaatgtaaagacctggacttacatccacaagaaacagtaagcaggtaaccatgatctccccacatggacaaagtgaggaacaagtgactgatcctgatgagatggtgatgtgtgagctctctaatcaagaattcaaaactgcagttttaaggaaactcaatgatcttcaagaaaacatggaaaagcagttcagaaatttatcagagaaatttaacgaagggattgaaataatttaaagaaaacaaacaggaatcttggaattgagaaatatatttgctgaacaggaaaatttattagagtctctcaacagcagaatggatcagaggaaagaatcaacccaaataagactcccccaaggcataaaataatcgaattctcaaaagtcaagggcaaagagaagattttaaaacagaaagagaaaagaagcaaatggcataaagaagctccaattctgtggcaacagattttcagtggaaatcatacagaccaggagggagtgacatgacattctcaaaatgctgaaaaaatattgacatttgagaatactttatccagtgaagttatccttcaatataaaggagagagaaagtttcctagacaaacaaaagctgagataattcacaccatcagactagtcttcctgtaaatactaaagggtaaatactaaatacttcaatgtgaaagtaaaaaaaaaaacactaacatgcaaaacaaccacaacaacaataacaacatttgaaggtataaaatccactggtgaaattaagtacgtagacaaacccagaatactcaaatagtaattgtggaaagtaatccaatcataactctagcatgagtctcaaaatataaatctatcaaaaacaataatacattttaggaggccaaggttggcagattccttgaggtcaagagttcaagaccagcctggtcaaaatggtgaaaccccatctctaccaaaaaatacaaaaatttgcagggtatggtagcacatgcctgtcgtttcagctatttgggaggctgaggcaggagaattgcttgaacccaggaggtggaggttgcagtgagctgagattgcactactgcactccagcctgggtgacagagggagactctgtcttaaaaaaaaatagctacctgtttggagaaaggtaatataaaatatgtaaatagagacaaagtcaaaatttgcaaaggatgaaattaaagagtagagtttttttggggggttttctgtttctattattttatttgtgatctaagataagttgttaccttttcttctcttgaagatactttgttatatctatgtttttggaagtcttatggtaactgcaacgcaaaaaatctatgatagatccactgaaaataaaaaacaatgacttaaaacatactaccagagacaatcaaccacaaggaagacagtaaaaaatgaagaaaggaagaggggagttacaaaacaaccagaaaacaggcaacaaagtggcagtagtaagttcttacttaaaaatattgaacactgaatataaatggactctattctccaattaaaaggcatagagtggctgaatgctgcctatatgctgcctacaagaaaccacttcatgtaaaaagatacaaatagactgaaagtgaagggggtggaaaaagatatttcatgcaagtggaaaccaaaagagagcaggagtagctatactgatatgagataaactacaaatcaaagactataaaaagagacaaagaaagtcactatgtaatgataaagcgctcagttcagcaagaggagatgccaattataaatatctatgcatccaacacttgagctcccaagtctcccaagtatttaaagcaaacaatagtggatctaaaaggagagatagactgaatacaatattaattaggggactttaacaccctgctctcagcaatggccagatctttcagacagaaaatcaacaaggaaacttcaaagttaaactacacactagatcaaataggcctaactggcatttacgggacatttcactaactatctaactgttacagaattcacattattttcatcagcacatagaacattcttcagaacagaccacatcttaagtcccaaaaccagtcagaataaattcaaaaaagtttatatcacatcaagcatttgttctgaccacaatggaataaaactacaataaatgaataactttctggacacatacaacctaccaagatggaagcatgaaaaggcagaaaaacccaacaaaccaacatgaaactgtaacaaaaggaaaacccaggaccgaatgacttcactgctgaattctaccaaacatttaataagaactaaaaccaattctactcaaaatgctttaaaaaattgaagaggatggaacactttcaaactcattctacaaggtcagcattatcctgataccaaaaccagacaaggacaggacaaaaacaaacaaacaaacaaacaaacaaacaaacaaaaaaacactacaggattgcttgaggccaggagtttgagatcagcctgggcaacatagtcagaaccaatctcttaaaaaaaaaaaaaaagaaaaaaattagccaggcatggtggcatgtgcctttagtcctagctactcgggaggctgaggtgagaggaccaattgagcccaggaggttgaggccgcagtgagccatgtttgtgtcactgtactccagcctggggaacagagcaagatgctctctcaaaaacaaaaagcaagctgggtgtggtggctcctgcctgtaatcacagcactttggaaggctgaggtgggagaactgcttaagcccaggagttcaagaccagtctggacaacatagggggactccatctctcaaaaacaaccaaccaaaacaaagccaaaaaagaacataggccaacatcactaacaaacatagatgtaaaagtcctcaataaaatattaacaaaccatgtttagaaacacatcaaaagagatcattcactatgattaagtgagattcatcccagggatgccagtatggctcaacatatgcaaatcaataaatgtgatccatcacattaaagagaaccaagaacaaaaaccatataatcactccagcaagtgcagaaaaggcatttaataaaagaatgggttgagggagtggagcccatagtcagagcagcagtggtctgggattttggaagtagaaagaagggcagcaccactggccaggaccaccagggaacacccccataggccctgggtgttgtgctccagggagggttccctctggagttattaatcttggtgtccactttgcccagctgcccctcacagggtcagggaggatgaagggaaagcttccttctaatgaaagttcagggactcacagttcctagagcctgtagggagaggaagatcttcgaggaagagcacctgggcattggggcgtttgagaggaagatctatgccaggtccaagtggacaacctgtggactctctctccagggacatacgggtatctgggaatctcctgtagcttaaagaggtaaagacctctccctttagcctgaggactggaggatgctggttcaggtgaatgagtcctgcaggggctggtacaggcctggagggtggtggtgtccagggccttgggttcacccttagcatgattcaggccgggcggtgtttcacatgagcaagagggcctgggttcattgcttcaggacaatggtgaaatctcatggtggaagaaatcttgtccttgccagtgcccagctttcatttggtcttggcccagagtgtcctccctagagaagactcttgtcccttcttcacactgcccttcagggatatgccagccttatgggataagatggggtggagactgtagatgtgggtgggaatctctccacagagtgctccttctctcagcggttgcaccttgtctcagggcttcagcttgaaatctgggatctccaagcccttccctccccagtcctggccaggaccacatgggcagatgcattgtgtgaagtgcatttcatttggggtgtcctctctgcatggcaccctcccgttgattctctttgcgcatgtcagagtgcaggcaccatccacacctcctgctggaggagggacggagctgttgactcctgagagctgatcatgtgttcccaccctcacacacaatcatggtccatcctctgagggacatgtgttgccaccactgtggagatggtgcaactgacagtaacaaacagtaaaatctggtactgaatgggaccttaagccaacaatgacaatgtcattccaaggtgtttcatttttattgattcaatgcaagtcacctgatttcattgactattcacaatagctcgataaagtaaatgcatcatcaccaccactttaaagaggaaaaaggtgcttgggcagtttgtgactactgtggtggctgctgcattgctctctggtaaagccaagtaggtggtgggtgcggcctctgggctgggatgatccaccctcctggtggtggcaggggagccaagctggagccatggcctgtgcagtggtagcagctgaactgaccgctgctgcaggatttgcaagctgttacattttgcgaagccatgaagcacataaaacctcaagtagaacaagtgtttcaaagtctaccaaaatctgccttcagagattattactacagaggtggatatgaacccaaaatgacaaaacgggaagcagcattaatactagataatgaatgaacactagtaatagtagggtaagccctactgccaataaagaaaaaaataagagatgctcattaacatgttatgctcttaaatcacgcagacaaaagagggtctccttatatagtagccacaatcaatgaagctaaagatttactgcaagatcaagctaaaaacagtaggtgtataatgaatttttaacttcatattagtttatgtatatgaatatcaagtttttataataaaatgcctccaaacaaagaatatttgatttagggtttaataacttctaagaggggactcagatgtttcctgtttcacagtcagtctgagagggtcatttttcctggagctgacctgggtggaggcctcacactgatactccccagcatcctctctcctgatggggtttatgctgagcatacagtggccctgggacagctccattctctccatgagtcacagacgctggtcatggaagatccactggataaggttccagagtcatctgtggggcaggtcaggatcacaacatccttttcttctgtgactctggtgttgctgactcagatggggtcggagccactgaccctgtggacaatcagtggaggtgctcaactgaaagtgggctgagggcacgtcttctcctccatccctgggtccttaaggtaactgtggaccccagaccaactgacacaggagctagaaagaaattatttaggaagttagtgagggtaagagcgtccttggcaaggtttcccctttaacaaaaagcagcccaagataattccttttctaacaaagagcagcctgaaaaattgagctacagatgtagatgagcaagatggaagcttgcacaggtgaattccagtaggtgtgccaatagaaaagggctgcctggaagccaggtatgttcaacatggagactccatcctcccttttctccattaccacatgtacagtaaaaaaccaggcaacatggcaccggccaggtagacaatccatctgcatgacaaaagatcagagtggggcagccagcaaatggcacagctggtctaaacaatctttcaccccctgtataaatcagacactgcctcctgaagctcatctataaaaccttctgcatttcactatggaagtggcaacccattttccccaggacccctctctctgtgcagagagctcttctctttctttcccctatgaaacttccactcttaacttcactctgggtgcctgcatcctagttttccatggccatgggacaatgaacctcgagtattaccccagatgaatgatgctgtttcacaatcactggttcagctcccttcttcttagggtttcacagctcggtggggagaataccacgcctcagtggtctggggagtgaggaacaaatgaagaattaatcagattttacttagaacgctatcacctgcctcaaccatcagatccatgttgggaatgtccaggcctcctctcttagatctatacccacttcactggacctgaaatcctgtgtttcccgatgtgttggtgtcactcctatgagaggataaaggagagaactttgctttctctccccactcacaccctgcacaagacagggcccaatatgagacacacactcgctcagtagttctctcatgaaggagggagggagtgacctcgagtgattctgccatctgtagtctgtgtaccctggccagtggctgtatcttcatatgcctcagtttcccctcagtaaaataggacacacaatgagaactaaaaataaaattctaattccccagtgaactgaaaggatggcctcttggccaagcggatcccagagttcctgatcatgacaggatgggaggttacacctcattacagcccctccctttggaagtttagaggtgacaactgactagcattaacgctaaaatcgagatcatgagactgacagaacagactctctgtggccataagataccaaattataaactcaacctaaggtcatgcaggcaagggctaagccacactttcctacatttaaagaataagctatgttctaacacagaattttctttctctctagcggctaaagtaacactagccttcgagataagcaatattgaaatgatcgcggctcatccaccaacactggctaactgacccctgttccaacagccacaactacacttcaattggacaggagactgatttcagtaactttctcctaataagagaccactgagcatggcctggttctgctggtatacagacacggtgcactgagtaccataatgcttgtttcatcttttgatgtataagacctaatttaatacatttaaatctgaattctccaccccaaagtgaacatggggtgcatgtagcatgcatgtttgttgatcacgcatgtgcgtgtacttcctttgtgagtatccatagctccacctataacctgttgaatatgtatacctggccaactcattcagcataaatctatcttccacattcccctcccttgaagtgcctgctattggtctctgctggaggctgcatcttctaccctggggaatggccagcctgcaggctgtaaccctgtgtaagaaataacctggttgggtgcagtggctcacacctgtaatcccagtggtttgggaggttgaagtggtagaatagtttgagctcaggagccagagactagcctgggcagcatagcaagatcctgtctcttaaaaaaattttagggaggagagtgaggatcagaaaaaatacctattggctattatgcttagtacttggatcatgaaataatctgtataccaaacccctgattacatatataacaaacctgcatgcgtatctttgaacctaagataaaagtttgttttaaaaactatctgggtgcagtggtgcatgcctatagttccagctactcgagactgaggtgtgaggagtgcttgagctcgggggattgaggctgcagtgaattatggtcccacctgtgagtagccacttcactcaaacctgggagacagagcaagaaccggtctctaaaaaaaaataaaaatagaaaaataaaatgaaaaatatatgaaataaagtctcctttccaaacgtacagatctccgatttttctgccaacaatgataaatggtcagtggcttgccatgttgtctgtgaattacttttaaaatattcacgatcacctgacctaaaggttggtaccaaggaaccgcctgaatacaccgtctctgattatttgcctccaacagagtgttccctgggcctgatctctggtggacaatgagctgctgggaacatcctctcttctctattcctcccctggggatgctgaccttcccttggagtctcctaagttccccagggcagtcggctaatgtcctagggagcttacctgtcttctccataccaagtctcatgtgaaggacgaggctttgcccttgcccagatgaggctctgggggctgagccctggctggctaccagctgcaagagccatggcccttggacagctggtaaatccttgttcccagtcagccctgcccaagatgcctcaacccagccccggcacaggcttcccagggtcacatggagtcaggatcctgggacaggggactggacaggggtttccagggctgagtttctgaacaggggcttcccaggggtcccctcactccaggatctgacatggtcctacaaggaacgtccatggggaggggacccaggagggggaactgacactgacctccccttactgagcctccccccaaccccatcagactgtccttcctctgtagcaagtgcctgcagggtctggatgcaggaaagaaattctgatctgtggaagtttgtctcccctgtgtgtgtcttgcactaaatgtccaaacccccaaatgggatgtaatgtagagggggacacaggcacagcccaggcctgaaaatcctgtgtgtgtgaagcagaactgacccccaacacccagagctcatgagacatcactgtgtacgtgaaactggccagttacttcttcattcacaagatctgtttttatgacttgtagggtgtaggatcctgtgtcattgttggtgacattctgtatcagcagacatgtattggggtatattgtctctcagcctctgtggcaggtcctggggtaattacttgagttcctagtacatatcctgtaattcccctttgtaccagttgtagccaagcctaaggcagattgtgggtgagtggaagaatctccttgccttctgcagcttcaacagtgacttgggcagtggtaggcaagttccagaaagttaaaagtgaggctaggagtggggagagagcatcagttaatactgggccctatgcattgaggtggaaagatggggccctaggtcctggacaggtctcttcatccctcagccttggagtgtgtgtgtgtgtgtgtgtgtgtgtgtgtgtgtgtgtgtgcgcgcgcgcgcgtgcgtgcgtgtcctactgggccaaggtcagcagcatgacctcccttccttcagtgcctctgaccttggcatttccctgtttggagtccttttccccaggggtctgcctggctccctccctactgccttcaggtcctgctcacattagggcatccttgggagaccccttccctgacacctctagagaccctgggtcttccctttctgacctttcgctgctgtgttccctccagggctcttgtcaatacttgacctcacattctagatacccttgcatgtctgtcttcctccctatgagagcatgagctctgtgagaacagggacttgtgtgatcttggttgcaccccagtgcctgggacaggctgcggactcctgtggatgagctcatgagtgttcccagggcccttcacaacgtgggatttattttccaatggctgaggttgttggctaagagctctgttggagttcaatcaggctggtgggaaaaatattagagatagttatagagatagacacaaatcttcttggaagaccaaaaagtttgcataactttggtaatagatctgactgaaggtggtccctttacctttagttaaacaaattaaagtagtaacaaaggaaggcagagtagtttgtctagccagcttgtttactcatgtgatcttaagactaaccattgatgtgccacaggtgcttaattgctttctacttgggaagtccacaatgtcaattaccctctaacggtgttgactcaagcctttgttaattaatcttactgaataaatatgagtctcactagctgatcaaggccatggtcacaactgtttataggactcagcagggagtctgtaagcggccctgacagactcagctggactggcaaagcaaaatatgtgtgtgtcagtgtacactattcacccgtcccccacagctggtgcccctatatgaggagtgctgccacagagctctgtttagtgtcccttgttttttttcttgagtattaccccaacttaaattgtgattattgtcatctgttttcaacattaactgctcagtgatgattcacttggaaaacattaacaatcgagattgtttcttcactaacaacctcagattatttagattttcctgttgtaatcccttcttcctgtttagtgtccaacagaagccctctgtccctctcaggtccccgttctctccaagaaaccccagccagtctctgtgctccctcctcccatccactcccagggagccctcccctcacctgtgagcagaagcgcctgccagggatgtgcactctgtgaggaggggctgagggaggccccatgggctctgctgtctgctttgtcctcctctgtggagaggagcttgggcttcagaaaataaggaggccagaaagtaaggaacaggctgagaaataatggggatgtgtcgaaaggtcacagatgccaacatctttgtcctatgcaatattatccataaaattacaggtttgagatatgcttaaattttcttctaacatgcattaaaataaacatataacttttaatagttatattaaattgtatttaatataaattaaatgctcttgtcagagctactgtgactgtcagctctgctgtccttcctctctctgtgctaagcctcctcccagggcagaagcacttcccagggccaggggtgggggcggggaaaggtaagtggcaatgaggatctgcacaggtagcctttccgcctcctcccctctcagtcctgcctccttgtcttcttttcctctttttctccaatctacatttcagttccttagaccacgctgtgagaagcaaggcttattgggacccccatcccttaacaggatgacctgtgctccccataagtgacctctgctgtgtctagggattggctctgtcagcacctcacagagagtccctggggcccccaaactcagtgttattttctctatgacacagaaacccctctgggtatgcaaggttttcctcatgttttctaatgtctgggaaggttggatttactcccagcagggaggtcacagagatgtccagggagtggggtcctagaaatggacaaatctagagctaaagcccaggtctacgattttcagttgtttttttctgcagtgctatgtgaccctaatttcctaggagtaactaaaatgcaaacctcagacatttgtagacattttatgatttttctctacagcttgtaccactgttattattatttgctttatgctttttcctaaataaatttactttacaaaacatccttgtcctagtagggtgcaggggctcacgtctgtgatctcagctgcttgagaggttgaggtgggtggattgcttgaggacgggaatttgagacaaaacatctttgtcctatgcaatattatccataaaattacaggtttgagatatgcttaaattttcttctaacatgtattaaaataaacatataacttttaatcatcatattaaattgtatttaatataaatttatatacaatacatttttatataataaattatatatataaatgtatatataatagtttttcttttttgagatggagtctggctctgtctcccaggctggagtgcagtggcacgatctcagctcactgcagcctccgccttctgggttcaaacgattctcctacctcagcctcccgagtagctgggattacaggcgcctgccgccacgcccagctaatttttgtacttttttagtagagatggggtttcgccatgttggccaggctggtctcaaacacctgacttcaggtgatatgccgcctcggcctcccaaagtgctgggattacaggcatgagccaccatgcctggcctatatattttatataattatataaagttttctataataaattttatataataatatataaaatggatatttatttaagataaagttattagttttatatatttacatatatttaggaataaatgtgttactgtgggagcccagtgcccaggcaggtagtcagtacatgatggttgtcattagggttaatactttggaattctggattttttcccaagagagtgtctacgctggaatattgggcttgtggctttctgctgatgtgcatgtgtgaagaagctacttccacttattaggacttgtgtatctgtctcgcagtttcactacctattttctcgtgatgttggtcaagtcgcctaacttttctgtgcctcatttacctaatttgtagaatatgggtaacagtacacaagtgtgagtgtgtatttcccaggactgaccactagagggcgtgaaggcaccggcacttactattacagcaatgggtgtagtagtgctcatggtcgtaaacatcattctcccatgaaaggaaccagggcttcctgggagaaataactgattccagggctggggccggaaagcacaagcggagcctggagcatctcgtgaggccagaaagtaaggagccggctgaaaaataatggagatctgtcgaaaggtcacagatgccaaccagaaggagctttgaatgaccaattttgagacaaaatgagcactataagaaataatgatagtaataaattccaacccataaatacccatgagttcctactaatataaataaataattgaatacataaatatataaggatgaagaaacagctttttcttacagcagaattccaattaatgaatgtagaaggaatgatcaaatagaaaatcactatttggctaacagcacagtcaattgtttgtaggcaagaattatcaatggactttaaatatgaatgggtaaaagtatgatgatgctacaactagtgagtaccaagggggaaaaaaaagtacgttgagaagaaacaggctacttccatattcccaaagtatcacttcaggagctacttattgattataatgggacaaatagtaacttacagtagagaaacctggcaacagagtctctccgaggtacaaaggctctcttcaggaaggaggtaaggggaaggaagaagaaaacactgtcctgcctcaattatttgctttccccattctcaagtgtacttcatagacattcaaagatatgtgttgatagtgtccacgatccacatggctctattatagtcatttattcacacatacattcagtgaggctttgagtgcctaatgtgtgcctgatatttgctagatggtggatgctgagaagatcaggtgtgctgctgtctctagggtgactgaatccacctgccccactttacagatgtggaaattaaagtgaaaaggatttataggattagttcactgtcacaaggtcactagccttaaagttacaggagtaaagcaagtttcctgacttgctagattttctgctgcaggtgctgacaatggtgagctccaataggagagaggacactcagagtgaagtgggagccctgaacaccctggattagccaagaggacatgccgggtccagctgtgaccgcacaaaggaccattggggatatttgtattctctttttcacttagagcttgaaatgaggaaaactaagtgcagaaaaccaagagtggaagatttttcacaaagcactggtaacatgcatcagaaaaccctgtgctgatgtctgtcacggtgtttctcactgaacggtaatagtctggctttgagtgtgttccctctacagcctggagttctgcgaggcagggaccaggtgtgattcatctttgtctctccagtgacagtacacagcaggctctgataaatatttcttacaaaataaaatggaataaaaagtagacatctgcacaggtgtgggatgactgagcagcagcagaagcaggaaaagtcagcgtccccagatcagctgatgtggtgttcggattctagataggggtgaggtgccaggatggggatgggggtcctgtggctctgctgccctgggggacacccctaggtttcacagtgcctgctgtggttgctgcactttgcttccccatgggaaagtgatcagagggtgtggggcttcaggtgaccccatgtgggaaatggccaagggaaggtggggtgggcggcacatggttttttttaaccaatatttgaaggtaggttgtatgaaaaggtgttaggcttatttcagcttatggggagtaggacagggattggtgagtgtgtatcaggtatattttggctcaggatggaaaagaactgtcacagtaacataaggtcttttgggaaattacatgtttactggcagagttcaggccagggctgggtgtctgaaaatacctgtcagggtcacttttatggttacaagggcagagcttggcttggaaccaggtttcttactaataccacatattaagtattataaaaactgtcctttgcaataggacattgctctatgatgcaggttgaggtccctctgtttaagtaattgtgggtggctgtgattctctcatctagtctgcgacttggacttcacctccatctgcagtccctctcctttgctgttgacactggtcagagttaagcgcatttactgacgatggtcacagggtggcagcactgcctctctggtattttctaaaacctcttcctggaactgagccagtctaagaggatgtcatgactaagaaaagggcactaatgaggtgaacagataattttttttttcttgtttctcctgtgaagtaacagagtggaggtgagcatggaataattgccttttagaaatggaagacaatggagagaagtgtttcgcaaaccttaatgtgttcacagatcccacacagatctttttattcaatacagattctgatttttctggtgaggcctgagattgtgcatgtctaaggagcttttggatgatgccattgctgctggttggcggaccacactttgagtagcaaggctcgaagatcatttagaggttaattctcactgcatctaatttatggatgaaaacaaaccaaggtccagagagagcatatacagcttgcctaacaaagccattccctaagtgcctgacttcttgcatttaaacccagggcttcagcctttgtccagttctcactccacacatcacacggtttgttcactgttgtgaacgacagttgtggcagcatctctttagtttaggaatccagagccccaatttcactaccctctttggtcttggctcatgctgtgacttcgaatagttttgcccttacttaaaatcttcagtggctcttttgtaatcacaagatcaagttcgaatatctctgtctagtgttcatggctttataacatatggtatctctttagtaaccttacctaacttccctgttttaaaattgtctcttgctgccatagccctccttgctccttcctgctccctaacaaactgtgttcacttctctctcagtggtagtgatgatggcatggcctctgatgttagactcatgtaacttctaatcccagatccaccaccaacattggcaagttgattcatctttctgaggataagcatcctcctctgaaataaacttagatggcggttgagaggggtaaataaaataacacacaaacccactctcatccctgagaccctcttcaaaactagcatataaaaatagctatttgaagaggttcagtgaaattcaaggtaacacagagaaggaattcagaatcctatcagataaatttaatagactgaaataatttttaaaaatcaggcagaaattctgtagctgaaaaattcaattgacaaaccgaagaatgcactaaatctttcaacagcagaattgatcaagcagaagaaagaatttgtgagcttgaagagataatatatgaaaactcagagtcagagagacaaaagaaaaaagaattaaaagaataatgcatgcctacaaggtttgattattaagctactcaaagagatacaagagaagggtgaaaaccaacataaagaaatgtaaaaaacaatcagaatataaatgaaaaattttctaaaatgctagctagtttttttttgagacaggctcttactctcatcacccatgctggagtgaagtggcacagtcatggctcactgcaggctcaacttcctgggctcagatgattctcccacattagccttccaagtagctaggactaaaggcgtgtgccaccaggccaggctaattttttgtatttttagtagagatggggttttgccatcttacccagggctggtcttgaactcctgggctcaagtgatccaggagattcactgccaaaaaggatataaccaagtcatatagtcataggttatctaaagtcaatgtgaaggcaagaattctaagagcagtgagacaaaagcatcaattaacttataaaggaaaacctatcagtctaacaccagatttctcatcagaaaccttacaaaccagaaggtattggggtcctaatcttttggcttcttaaacagaatagctctcagccaagaatcttgtgtagagtgaaattatatttcaaaatgaaagagagaaatacagtctttttcaggcaagcaaatgcttcaggatttgtcacggctagaccatcctacatggaatgttaaagggacttctaaatcacaaaacaaaagatttaaatagaacagaatagaacctcttgaaaccaaaaaattcaaatggcctataaaacaataacacaataagaaaacaaagtagataacgatcaacatgatgactggaacaaatattaacattgaatgtaaatgacctaacactccacttaaaagacacagattggcaagataaataaaaaatcacaaaccaaatatcagctgtcttcaagagactcacttaacatgtaaggattcttatagactcaaggtaaagagatgataaaagatattccatgcaaatggaaaccataagtgagaaggaatagctatccttatatcatataaaacagactttaagcaacaacagtaagaaaaagacaaataaggcaactatataatgataaaaggatcaatcaaacaagaagatattacaatcctaaatatatatgcacctaactttggagctcccacattcataaaacggttatgatgagacctaagaaaaaagatcaacacaaaacagtgagggtgtcctgggttttctttttattggacagcagtgtactagcctatcactttcccagtcaggggatttttggtctccccattcccctaccatgggttcatgccaaagtccatattttttattagtgtttggaattggattttttttttttgaggtggagtctcgctctgttgcctaggctggagtgtagtggcacgatctcggctcactaacctctgcctcctgggttcaagcaattcttctgcctcagcctcctgagtacctgggactacaggtgcatgccaccacacccagctaatttttgtatttttagtagaaacgagatttcaccatattgtccaggcttgtatagaactcctgacctcatgtgacagggaaacaggcactcagtgaacttcatgcgattgaggagttaatgataatgagagaagggctgtgaggggacagcactggggacaccagagcctgtgacgggctgagttgctgtgccttgggagatgcccttttgactgagccctgggaaggagggggtgtgggggcaggagctgcctgcagagggagtggcctcaggtgggcggccacctggctgcagggaagaggtgacagagttcgtgtgcagagcttggagggtgaggaggaggtgggttgaggtgaccttggtgagggtgaaccatggggggctgtgggccctgctgagggaggccagccagccctggacctacagggtggtttggtcttttttgtcccattcccagcatccactgagtggtgaaactctgcaggccagggaccatcccactggccagaaggagcgcacagtaggtgcccactcagtgcatgttgggctggacagaacctcactctgccccctgcccccagctttgggagctgcagcaaggtccctccccctagggatctccatgcctctgtctctgaggggtgagatggggagacttcaaagggccatctcagagtgtgggggatagagacgcagaagtgtgggggatagagggaggcctgggctctagacccaaaggaccttacacacctcctgagtcttttcaaatggtttcttctgttactttaaaaatgatgtaagtcatcatatttattgtaaatcccaggaatctaatcatgcgtaaaataaggtgtcttatccttgaccccaccccttccccaattaaatttccaggatgttaccactgtttgcagttggtgtgaatctctctttaataatactctgtttatctcacttgtcgttttacgccaaaatacccattgaattatattattgctgaagaccattcttttttttttttttttttttgagatggattcttgctctgttgcccaggctggagtgcaatggtgtgatctcggctcactgcaacctctgcctcctgggttcaagtgattctcctgcctcagcctcctgagtttctgggattacaggtgcacaccaccacacctggctaatttttgtatttttagtaaagacagggtttcaccatgttggtcaggctggtctcgaactcctgacctcatgatccaccctccttggcctcccaaaatgctgggattacaggcatgagccaccacacctgcccagaccattctgttctactgaatcatgtgtggtgggcacctcttatatcaatacatatggattttatcttgtgtttgttattggctcccctttttctcattgcatggctacactcaatgctttgtccacacccctgttcctgggttggaatcttgtgacagaaaatgaagtaacaaaggctaaagctttctaaagtggagtcaggagattgcaagacaattgcactttcaccagcaagagctcaaaccacagaatgttccaatagatttggataaacagctgaagtcagtattcaccagccttcaacatctcaactaggagaaccctaaaattaactaagcacatagaatggaatggacttgtgatttaggattccttctcagccaatgagctgcttctgaaaacaactttttgtggaaattacctgtaaagaaaaccctctcctgtgcttgtcttacagaacactagtcagggctgccctgattcagtggacccgaattgctattatttgtttcctaaacatatggtattttctgtgaccttcatctcaatcttttttttaagttactgggctgtttcccagttttcataatgacgagacattctgcagtgtttcatacacatgtcttttccccatgtggagtattgatccaggagctcattcagtcaacgcatgtttatgaagcatcctgtgccaggctgtgggctggtcactgtcttcagcagagagaggacaggcacagtcttgccttcacagagctcacagctcagggaggctcttagaagtgggatactggtcggagcatgtgcacattaaacatgatgaggtcaaggttgctatagggactaaaccacagtcccaccaagatcgcattgagttcctgtggtagaccagaggtcagggcccctaagatgtcctgagcagctccctctgctcagaagttttggttccacaggtgacacacctgagcacaggtgacccctgcagaacctgtgattaccacccaaagccaagagtgagtggtgggtgttctaggaggaaccgtcacctccatgggcagggttggggaagactgaggggagcaggtggctgatgactttggccagaaggtagggggatgggcaggtgtgcgctcatagggaagggaagagaagggagggcattgcaggcaacaacacaaaggttggaacctgccttcatggactgagaaaagcagggagtccacccaggctgcagctggggagggaagacatggggagcagtgggtctaggggagaagcagactgcgattgaccttggggactgggcagtgagcagaggtgtgttatgtgtgtctgtccccatcatagatatgaggaggggtgaggccgcgggtggcacctgggtcggtgggatttcatagtgcctgctgttccctagagcctctctgtatagagggtcagaatagatctgaggctgtggtctgggggaaggggctggtggtgcttaccatctctaggggtgggaggagagggatgaggatgcccctgagcagtgaagcctcaaggtgtgtggagccacagttgtctctcattagacatgtgttttgcgtgaggatgccagggcctggtggttattactgttgtcaagtttgcatgacaaggacccaggtatccagggatccagagcacagggcccctggtgaggggatgaggctcagatggggctgaccaggttcatgtggtcagagtgggagggactgatggagagacagagcctcaacccctcctgtcaggagctgtggctatgtccaggagagatgacaaggatgacccaggacattgagtgagtcattgagacattgaaggtgaggacagggcagagaggaccctggtgactgctgaaatgtaggatgtgaggagggctctgacccatgcaagttacaggacctccccacccccgagcccacagatgacccttaaattgggcatcctgagtgctgtgtgtgcccagcagggacactggataggctggacctgagtctctgtaagggcagcgctggtctgtaggaccagagtcttctctgtgggtgtgacgtgggcaggaattagcaagatgggggtgacaaggcttggcttggaggatctggtacagaagcccatgggcttggtcagctcagcttctcaggggctcagctggggctggaggagcaggatgctgtgctcagggcatgctccaggcagcgtgatgtgtgtggttccagggtcaggcacgggggtcaaaaattaaccatgaaaagttcccaccttctgtaggcagagaaaatggcctgattgtcagggtcagggagacttaccatgtggccaaagcaggctctcagcctcccagagaccacaccctgggtgcagcactcagctctgcagggtatggcaatagatgtgccaagaaccccaacatccagatgcatgcaaaaattttgcgatatataaaatagagcagatcaagtttccctgcaataacgttgttcctggttgtgtctttttcttgtaaactagacatggacatctttccagcagtctgttctcatctgccaccttcctgctgcagcacctcagaatgaacattcctgagacactgtccgtggtgctgacgaccaagagctatggaacagagtgtgatgtagaatcttctagttacctctgctctcctttcacttttaacaacagagcatcattaacaatgagaaggtggagaggtgttcaggatcttgaagtgacttctgtcttgctctcccataaccctgaagctgctgtagacattattgcagaaactgacaccacagtcaggatggccttgtccaggagcccatgtgcagtttgtagtgagcaaggatgagaaaatggtcttgaaaggggtgatggacagaacaggggcttttcaaaaatgtcacatcatcacccccagcatccgtgaatctgtcacatggtaagagaccttacagattaaatgaaggattatgagtttggaagattattgtagtttatccagatgggtccaacataatcacagaatcccttccttacaaatgagagagggaggtgggagagtcagagaaggaggaggagatgtggggatagatgcagaagacagagcggtgtcaagatgctgcactgctggctttgaagatggagaaagaggacacagccaaggatgcaggaggcctctaggaggtggaaaaggagaggaaacgcactctgccctggagcctccagaaagaacgcagccatgtgggcaccttggttcaagtttctgtgtcacttagcttgtgggaatttgtcacagcctcaacaggaacctacagaggagtcaccttgtgtgcaggtgggatccagggtcatttacagctaaatcctgatgtaaatattgcaggttgcttttcctacttcctatctcatggccaacaaccctggacaatggcagaacacccttggaaaccacggctctgtgctttagtggagggaccagcttgtttgtgggaaggtagcacctggtccaagtgaacctacatgagatcgttactctccccagggccctcagggaagggctgagaacagctggcccaggtgtgtggaggagctgcaggtgaggcagggctggaggggcctgtgggtccaggtagaggggcagacaggttgtcccatcgccatgggagcctgcacgagctttaggttggggaaccctgctcctctgacctggacgctcctgtgtggagaggaggcttgctcagtgagatccacgccagggggtaaattgggaactgatgggaaatgaggggctagagtcctgggtagtgcctgggaggaccttgctcaaggactgaattcttggtctgttcccaccttggttactctgacaacccctctctgtgtcccacggggataaagatctcctgagcagtggccattgggacagaggagaacctggtggccagagctaagcatccaggatcctggatttggggacaggcaagctcattgctgggggacagtgatagatacggcctccagggcctgggtgaagagagcaggagggctcaggacactggaggctgtgtggaggtcacacccacgatctgtaccacccatggatgctcctgcattgctcacctttgtgtggacatcagatggccccaacttttgcactcctgagacatctcatgcattcacagagggacccaggctggggctgtgcatggccttggtctctagggtagtgtgaggacagctgagcactcagctggctgggcaggactcctgcgaatcctgccctttcctgtgtagggtccaccccagcctgactcctaaccccctactcctgtctttccagggaagagagactggggttgagataaggtggagatatttttcctgtgtgacccaggagagaatggacatggagtttcaggtgagtttctgctaagttcccatgagcagaaaaagagccaatgagaggaagtttcccctttattcagatcctttccaggtgaccccgggtgggccataggcccattcactttccctgcaagcccccgcttcctgtggtgatgggaagccttcgccttggcccacccagagcccggggcagtctgttgaggtctctatatattcagcagggacccccatcccttcctgtccccaggcctgtgtctcctcaggactcagagctggttctctggctcaggctccatgtccttccccatccccagggctgggggcttcagggacgctccatcaacccacaggagcagctcccagaggaacctaagaagccacatctgctttgtggtcgatccagcagtaaatgtttgtgtcagagtgtagcaattccagtaaaaacagagaagaggtcttgacccctgaggccttctcagaacagggtctggcatctctctctgggcccacccagggctactctgggactgaacctggctgtgctcagggggttcctgctcccaggcccctccctcctctgctcaccacctcctgttattttcactgcagtttcctgaacttcagctcagccagatgccagtggggacagatcctgggtctccctggggcccaagggaccagaatatctgtggcccccactcacctcatagatgagagcagctgccctggtgctgggtaggggaatctgggcaggggagagaggggtgtcaggggacagggaaggattcctgctgtgtaggaattccagggctctcctcaggtgatggagggtcccagggtggggttagcacagggagtggatgatcctggccctgaacagaggcccagctcatggccagggcaggtctaaccttatccaagtcattctgggtagggtgggtttgtgctggggattgacagtccccctgccctgagcctgcacagctggggccccagtggaaatgggattgggaacggacagtcttacctaggagatggagctgtcagagggtccatggcctggggacagagacaaaagtgagcacgagagtgttaggatagctgggcccctcctgcaagagtgtgtgggggtcctcagttcttagagaattggggagagggagcctttctcaggttattttaggggtcaagtaagcaagtgaggttgaggaagtgacccatgacccagagcccggaggttagggctgacccggccagttggggtttcctgtgtgatgttttatgggatcctctttgcagccccagggatagggtcagaggcccctgggtgtaactggcaggagtggacaacttggggctggcttagtagttcccagccacacccagactgaagggacactcaccgggggtggaggctgggggctgctgctccctgaagtcactctgatcgctggccctaggaaaggtcagggttatttgtgaaggtgcaaggttaaaagtcacaaattggagttaaaataggggaccaggaaaggagcctatttccaagaggggtatggagacctcctttctttatggagttctgtggtaggaggggcccaggtgaggggagttgaggaaaggccttacaaagccacatctgtcctggccagaggggaaggactctcaggcagatgctgggccaggagaacattgatccagtgacacaggaaagggactgaggacccagggaaggaatcagaccaccaggggttgcctgagaggaagggtcaaggcaccagggggaaagcagggccaggcacatgtgcaggacactgaggggactgcatgcatcttggattctcctggaactcagtgtccctgctgtgaccagacactccactcagggctggagatgctgaaatgggacaatgatcttgtcttctgtctctgccctttggcaagagacataaacgacattccaggatatgccatattggggccccggttctcccttctcacagctcagtgtctgcagttaccatgtcagtcaaaggggtgctgaccccacccagcccgtccaggctgttccagtctccactatgtgataatgcccaggatcccccctcagatgccctctcactgggtggatggattcagtgaacagggggaggtaccaggtattgagcaccgctcccccctgctccaggcagctgtggctttgctgtgctaggaaactaggaccatgctcaggggcatggccttaattggactgaattcactgaggacaaagctgttgaggaagcagcccagggtcagcagctggtgaggaaggtgccatggaatgagagggaaggatccctggggagtcgggaggctggggagagcctggcactgaatacaagacagggtctccttccttctcgcctggggtcagcgtgaaggatgggagcagaatggggaaaagctgtggtacctgccagtttttcggaggagcaggaaacacacaagtgcagccaccagaagactcccaaccaggaccccgatcaggatgcctagagtgttgtcatctgctgaaagaagaaggcaaaggggatgaggtccaaatctgttccagggggaaccatgaggggccttgcagggcaggggcatggtcagggaggaaggaaatgccatggagcctgagtgtggtctgttgtgctgtcctcatagctggctcccttgctctccgtggttgcaccattttctgtgtcttaggcttgaattactgggatgcatcaactcctacattctcccacaggaagcctgcacctcatcctgctcctgtgttttttagtccctccttcctctcacatcactcctcttccccctgtttctttttttccatcccatggcagtcgtaaagggcaggcccttgctgccaactcaatgctgatgagcagggatgatgttcattgactgttttcaggggccttccacatggaaggcacagtgggaatcaatctacctgcagcttttctcaccctcccattgccttgagggagaagggtatgtgatattgtgaaatacgtatttggtgttcatcaccattgatatggttaggctctgtatccccacccaaatctcaccttgaattgtaataatccccatgtgttatgggagggaccttgtgggaggtaattgaatcatgagggtgggttttttccatcctgttcttgtgatagtgaataagtctcaggagatcagatggtttcataaagggaagcttccctacacatgtcctcttgcctgctgccatgtaagacatgcctttcaccttccatcatgattgtgagacctctccagccatgtggaattgtgaatcaattaaacctctttcttcatacattaccaagtctcaggtatgtcttcattagcagtgtgagaatggactaatacagtaaattggtaccagctagtggagtgctgctataaagatacctgaaaatgtggaagtgactttggaactgggtaacaggcagaggttggaacagtttggagggctcagaagaagacacaggaaaaaagtttgaaacttcctagagacttgttgaatggttttgattaaaacgctgatagtgatatggacaataaagtccaagctgaggtggtctcagacagagatgaggaacttcttgggaactggaacaaaggtgactcttgttatactctagaaaagagattggtggtattttgcccctgccctagagatctgcagaactttgaacttgagggaaatgatttagggcaactggtggaaaaaaaattctaagcagcaaagtgttcaagatgtgacttgggtactgttaaaaacactcagttttatgtatttacaaaggtatggtttggaattggaacttatgtttaaaagggaagcagagcataaaagtttggaaaatttgcagcctgatgatgcaatagaaaagaaaaatccattttctgaggagaaattcaagccagctgcagaaatgtgcataaacaatgaagagcaaaatgttaatccccaagacaatggcaaaaatgtctccagggcatgtcagagaccttcctggaagccccttccatcacaggactggaggcctaggaggaaaaaatgtttcctgggccaggcccagggctcccctgctgtgtgcggcctagagacttggtgccctgcatcccagccactccagccatggctaaagagggccaaggtacagctggggccatggcttcagagggtgcaagccccaaaccttggcagcttccatgtggtgttgagcctgcaggtgcacagaagtcaaggattgaggtttgggaaccttcgcctagatttcagaggatgtatgaaaatgcttggatgtccaggtgaaagtttgctgcagaagcagagccctcatggagaacctctgctagggaagtgttgaagggaaatgtggggttggaaccccgacacagagtccctactggggcactgcctaatggagctgtgagaagaagaccacaatcctccagaccccagaatggtagatccactaacagcttgcaccatgcacctagaaaagctgcagacactcaacgccagcctatgaaagcagccaggagtggggctgtaccctgcaaagccacaggggtggagcccaaggctatgggagttcagctcttgcatcagtgtgacctggatgtgagacatggatacaaaggagatcatttcagagcattaagatttggctgccctgctggattttgggcttgcatggggcctgtagcccctttgttttggccagtttctcccatttggaatgggtgtatttacccagtgcctgtacacccattatatctaggaagtaactaagcttgcttttgattttacaggcttataggtggaagggacttgccttgtctcagatgaaactttggacttggacttttgggttaatgctggaatgagttaagactttggggaactgttggaaggcatgattagttttgaaatgtgaggacatgagatttgggaggggtcgggtggaatgacatggtttggctcttcttcacccaaatatcaccttgaattttaataatccccacgtgttgggggaaggacccagtgggaggtaactgaatcatgggggtggattcttcccatgctgttctcatgatagtgaataagtctcacaagatctgatggttttagaaaggggagttcctctacacatgccctcttgcctgccgccatgtaagacatgccttttgccttctgccatgatttcaaggcctccccagctatgtggaactgtaagtcaattaaacctcatttttaaaaaaattacccagtctcaggtatgtctttatcagcagccaagaccagctcggtcgcggagatcctaacccagcagtgctagaggaattaaagacacacatagaaatatagaggtgtgaagtgggaaatcagggttctcacaggcttcagagctgagagccccaaacagagatttacccacatatttaataacagcaaaccagtcattagcattgtttctatagatattaaattaactaaaagtatcccttatgggaaaccaagggatgggccgaattaaaggaataggttgggctagttaactgcaacaggaacacgcccttaagatgcagattgctcatgctattgtttgtggcttaagaacgcctttaagcggttttccaccctgggtgggacaggtattccttgccctcattcctgtaaacccataaccttccagcttgggcattagggccattatgaacatgttacagtgctgcagagattttgtttatgaccagttttggggccagtttatggccagattttggggggcttgctcccaacagactaatacacccattttctggtatgtgactctaaagtccttagaatcttcaaagtgatgtctttttcaagctaataattgactgatgactggcagcccctaggcaacttcagaatgaggctggtcactgacccaggtaggattagagggttgggactttcagcctcacccctaatccctggggagggacctggagtttgaattaatcaccaatgaccaatgaatcaattaatggccaatgattgaatcaattaatggccaatgattaaatcaatcatatctatgtcatgaaccccaaaaggactgggtttgaagagctgaacccatggaagtttctggagtgtggtgcatctggggagggcatggaagctccacaccccttcccacatgccatgctctgtgcatctcttcatctgcatcctttgtaaagtcctttattacaaaccggtaagcctaagtatgtgtttccctgagtcctgagagctgtttgagcaaactaatccaacccaaacagggagtcatggaaacctcaatgtgaagccagtcataagaagctctggaggcccagacttgtgactggtgggaaggtggtggcaattttgtgggactgagccctctgctgatatgtccaggtagatagtgtcaggatggaattggaggacacctagctgatgtacggtgcagaactgattggctgctgggtgtgtgggagaaacccccccgcatcacatttggtcacagaagtgtgtctgtgttgatgattgttattgtggagtgagagcagaggaaaaacacagtttgagtttttccaaacagggtggaatcccatctgccaatttagaatctgaaacttatagtttcagtacttcaattaagattgaagtacttcaattcagtacttcaattaagattcagtacttcaattaagattcagtacttcaattaagattacagaactggtaagtgaaagtgatacaacaaaaatgtaaccaaagtctgctcaacttaacagctaataacaacaaagttcataaaaataataccagtcgatattgatagcactgattgagccctggctctgtgcatgaccttgttaagggctttaatcgcattaatctctgaataaatatcctcacaaccaccctgagatccaggtgtttgtaacaattctacagatgaggaaactgaggcccaggaggttgagtgtcttgcccaaggtcaaatacctggtacctattgtaaccaggatgataactggatgagtctaatccctgagttcttacccacattgctccccaggctctgaaggaatctcatccttctcattccgtgtatcattttacaccccccctccctcctaggaaaatatacaaggaaaggagtgagaggggccgagggtcactcacattttacagtcagcttgagggggtcgctcctgttggagctgactgggttggagacctcacactgatactccccagcgtcctcctgcctgatggggtctatggtgagcatatggttaaaccaggacagcttcatcctcttcgtgacctgcagacgctggttgttgaaaatccactggaaagaggttccagtgttatttgtgtggcaggtcaggaccacggagcccttctctgtgactgtggtgctgctggcttggatggagggctgagccactgactctgtggatagagtgaccaacagaaagtgtcttggggccatgctgcatcctcagagatctcagagtcaaatttagaacattctcctgtgaataaaggagaaagatgaaggacagggaggagcagagagaaccagagacacccatagcagcgagcagtagggactacagtgacctcagagaccccagggaccaggaggacccagctgcctcagaccaggaccagggagccctgaaaaccctcccacagatgagcggccccagagtcacatgagatgcaatacctggggtggctttaggagcaggcagtcagagaaatggaacatgggtctcagcccctaagggacaaggaagaggtgtggccagctcctcctaggatcctacatccaggacccagtctgtaaagaggttatgattattcctttcttttttcattaattccctccctccttcatcagagaactactgagtgtgtgtctcagttgggccttgtgcaggtacagggtgtagtgggaagagaaagctgagtcctttccttcatcctcccatgggagtgacatcaacaaatcaagaaattcatgatttcacgtccagtgagggaagaaatgtggatctgatgggagaggcttggacaatcctggcattgagtctgatagttgagacaggtgatttcgttctaagtaaaaactgactaattctccatttgcccgtcattcctcagaccagaatctccctctctgagctgaggatgcccaagaagaaaggagctgaaccaacatctggtcctggggtccacagatgccccacggtggtggccacgaccagattctgggctgcagacacacggtggtgtgacgttgagcactgacagcctgtgtgatgctgatgcaatttctctttaataaaatggggtaaatgtcaatggtccctggcttgccatcctctctgtaaattaacattaaaatatttacaattacctgacctaaagcttggcacagaatagctccaaataaacatcatctattattattttactccaaaaaaaaaaaaaaaagagttctctgggcctgattcctggtggagaaggagcggtccagagtgtcttttctctgctttccctcctcctgaggacagtgcacttcccgggacatcttttaagtttcccatccagtttaatggcctgggaagtttgtttgtctgtcctctccactctgactctcaggtgaaagatgaggctctgcccttgcccagatggggctctgggggctgagccctgcctggtgaccagctctaggaaccacggccctgggacagctggtaaatcgttgctcacaatcagccctgcccaggaagccacaacccagccctggcacaggctccccagggtcatctggagtcaggatcttgggacaggggcctggggcaggggcttgaagggctgagcttctctcagaggatcctcaggccaggccctgactgagtcctataagatctttctcaggtcatgtctatgaggaggaggccaagcggggttggactgagactgattttcccccgctgcatctcccgcatcagactatccttcttgctgtagggaatttccacggagtccggataagggaaaggaattctgatctgttatagtttgtctcccctgggtgtgtcctgcactaaatgcccaaaccccaacatgggacgtaatgcagagggggatgcaggcacagcccaggcctgacaatcctgcgtatgtgaagcagaactgacccccaacacccagaggcacggaggaatcactcaccgtatacacggagatggtgagatgcctgttcaatctgagaatttctgtatgtgacttgtagggtgtagtatcccgtgtcctctagggtgacgttctggaaatgcagatctccactgggtgatattgtctctcgaccgctgtatgcaggccctggagtcctaacgtgagtgtctattacatatgctgcgattagctggttgggctccaccgttttccctttgtaccagccatagctgtaaagattctcgggcagataaaccacagagagatgaacattctccccttcagcaacttcaaagggcgctgatgcaataaagagccaggcagtggtgggtgcgttccagaaagttaaaagtgaggctaggaaagggagagaatatcagtcaatatttgacctatgcattggcatggaaagacggggtcctgggtgcaggtctcttcacccctcagccttagagggtgtgtgtgtgtgtgtgtgtcctactgggtcaaagtcagcagcatgaccctcattccttcagtacctctgaccttggcatttccttgtgtgaaccctctttcccaggggtctgcatggttccctccccactgccttcagttcctactcacacaagggaatccctgggagacttctttcgtgaagcctcctctagagaccctgggtcttccctttctgacctttcccagctctgttccctccagggctcttgtcagcacctgacctcacattctagatctctttgggtgtctgtcttcccccccatgagattgtgagctctgtgagggcatggacttgagtgatgttagttgcaccccagtgcctgggacaggctgcagactcctgtggatgagttcatgagcgttcccagggccttccatatcctggggtttatttgctaatgtctgaggttggcagatgaagacagagtttcatgccctggtggtgtttttatttaaattgtcactgtgatatagttttactatcattttcaaaatgtagtggccactgacaatgaacttgaaaacatggaccaactgagattgttttgccccttggcaattccagttcacttagattttttggttctccttagacgctctctcccctgagtctctaacaaaagccctctgtctcctctcagagccccatcctccccaggagaccccagccagtctctgtgctccctcctcccacccactcccagggagtcctcccctcacctgtgagcaagagcccctgccaggggatgcattctctgtggggacaagctgaggggggccccatggtctctgctgcctgctctgtcctcctctgtggagaggagcttgggctccaggaacgctctagacagggttactgtgactgttgtctctgctgtccttccttcctctatgctgagcttcctctcaggcaggagcacttcccgtttatgggcaagggcggggctctgcctacaatgtctctctgtcccctcccctctcagtcctgcctcccttgtccctcctttctccttcctttttgcctatatttggttccctaggcaaaactttgagaagcaacgctgatggggtcctcataacaggacgacccactctccccagtactgacctctgctgtgttctggccttggttctgtcacagccggtagattatttccctttgtgacacacaaaaccagctgggccctgggtctcctcatgctctccagtgctccaggaaggcagaatgatgcccagcaggaaagtgacagaggtggctctgggggctagaaaggggctcactgggtgatggctgggaaggacccacccgctatcttcagtgtcaccagcctggcctctgacccagggacagagacccaggcctggaggtctcgggaggatccccagctcctaggtgtggagggaggtgtcctgtgtgtcctgggaagagaggactttgatggaaggaggtgggaggctctgggttctgctgtccttggtgaaggtttcagggggaccctctccatgtctggggtctgtgcccccagcttaactctcattctctttgcaaatacatatattttgtggatctgcagttgcctgaactgtctcatgtccctaaatctttgtatccctttttacagaaggtcaggaagggtgtgtacatgagtatgaggactatctgatcagggcgagtgtttgtttcccaaagatctctttagatatggtataatacataagataaatgtactgaattagcaattttaagtgtagaattaaatgatactaattctattcacaatgttgtacaaccatcaccataattttttaccagaaaatcttcattataccaaatggaaacttcatacttttaatcaataactccccacttccccctgccccacccactggtagcctctgatactatcaatctctgtgaatttgcctagtttacatgtctcatataataaggaattatatacgtgtattatttttttctggattatttctcttagggtaacacttttaagattcatccacgtcgtagcatatattacagcttctttcctatttatggctgagtaatatcccaatatatgtttatacctcaattttaattcattcatctcttaatggacatgtgggtggtttccacatttttgctattgtgaaaaccgctgcaatgaacttacacttggaagtatctgtttgggtttctgtgttcatttctttgggggtacatataggagtataaatatggggtcatgtggtagttctatgtttaagtttttgagaaacagccaaactgttttccagtttgctgtgctattttatattcccatcagcaatatacgagggttccattttctctacattcttgtaaacacttactatttaatattttttaaaacttatagccattctagtaggtgtgaagtgatagctcattgcagttttgattttcatttccctggtggctgatgaagttgagcattttttcatgtatttactgacaattttaatattttttagagaactatttattcaaatcatttgctgtttaaaaaaaatgggttatctttttattattcagttgtaatagttctttatatattttagatacaagtcccttatggggtacatgatttgcaaaatttttctcatattctgtgtcttctcactttcttcatggtgttctttgaagcacaaacatttttaactttgatgaagttcacttatctatttttaattttgttacttatgctcttgatgtcatattgaagaaaccattgcccaatccaagatcattaagttttactcctatatgttcttctaatggtttgataagttttgctattccatttaggtttttgaaacattttgagttaacttttgtatgggctgtgaggtaggggtctaactacactatctcgcatgtggttatccagttgttccagcacaatatgaagaggctaccattctttccccattgaggaatcttggcacccatgtcaaaaaccaatgggctgtaatggtgagggtttatttctggactcttgattctattccattgatctctatgtgcattcttgtgccagaagcacactgttttaatgattgtagtgttttagtaagttttcaaattaggaagtgagtcctccaatttttttttccagattgttttggccattctggggtgacttttaaaaaagatgtagttcaatggttctcaaagcaggagtggttcagctctccttttttggcagtctggagacctttttaggaccttaatctaagtagataaattattcccactttcttttctgagttgctatgttacagtgtatattgacacccatgaaataattgagagaccctggaagtgcttgcctacatagtgagggacaattagttccatgatcatgggcacagaagattttgttttgggaaacaattttgttggtggagttatattcatgcttactcttttatttgtcttcatagcctgcatctccttcagacttcatatctgtttattttcttgtttgtcctctggggtttgggtgttgggtgaccagtcagctggagctggaggaggtgcttagcaaggcagtgaccctggttgggaggagcagggctcagcagggtgaaagtagctgggccttgagtcaggagtggcatctggaaggcctgactgtaagggtcagaagggccagcaggtgggtgtcctaggcacaaacggtggctgctgctgtggactggaggaaggtaagaggccccgagtattccatgttcttactggctccccaactgaggattcctctcctgggctggtgctgtcctgcagcagggaggggttagacagggacggctgcacatcaggccggagtccatgtcatcctcttaggcactgtcactacagattgaggattctgttcataagccaagcctttgcacaaggaagggacccgggctctcaaggaagagcagctcctggtcagacctccatctccttctctctcattgcctgaggcctcaagcttggtctacctggcacaggggtctggatcctcctcccagggttggggtcttactgagctgggcacctgcaggtgggagaagatctggaggggccccatctgccttcaccagattgatgttgagggtccctgagtcctgcaccactatcaggtgctgagcaacttccagtgtcagtgacaaccaccccatggtggaagcagaaccacctcgtgagaaagcacctccaagcctcagtgcttgccatgtgtgggaatttgctggtttcagttgggggcatgttggtgggtggtcatgaattcagggccggattctatgctcacagtgcacatgctggatgtggtacagaccccaggcagggctcagtggggtggttttgggtgtgcacaggtatcttttctggaggagctggtggtgatttggctcccagaagttcctgagctctgcagactcaccaagcactcaatatttgagtgaacattgggcgagagagcagaaggtaagtgtcagggcatcggggttggtgcctctgggaagaggaggaacattctgggaacaaagctctcccccggcttacagggagcttcccatcgctcctgccttgaggatcagggaaactagggcctctgctcttccaggggctgcttgcaggcagtttgctctgggagggggtgacccaggagttgcctctcattttgcatttgagatttaaaaggagaagggacagtatatcttgccaggtcacaaaaattacaggcatcatattgactgaagggcactcctgtcatcactgcaatataccagaatggtcttttaaaaaaataagtgatttaggtttaccagcaactgtaatgcttgttttattcttctagttcaccgttaatgtcacttttgtagttttagcactggcaatgttgattttatgttgactctgatgattttaagctttcatttgttcacatagagatcatcttctttctgaatattaatgcattttttctctatttctactggttattcctgtacatagagtagagaatcacttttcccaaggaggtggaaagcttctgactaccaaaaaaaaaaaaaagtgtcaaaatgctttaaagtcagtaacttaaagatcaaatccaagagtgggcaacagattctgcccagggtctgaaaggtggagaggtgactggtgaggatgtttaaaagacctctcctctctactccctaaatgggggccatccagtgttcttgaggttcagagaaggcccagggctggggcagcagggcactgtcagctcccagctcccaggggccaggagtaagaccccaacactgtccagacactgattgcattcattttgggggagagtagattcttatttaaagaataatacaaaagtctacaaatatgaacataaacagaaattcctttgctacaattttccccttaataagacattccttcctaatgacatatgtgactgcattcatggctgagatgttttctaggatggtgagagcatcagagtggactatctggtgccttggggtcatgcattttcttcttccaatgtctacaggatcccccatgtcccactttgtagtgtaactcagtgtgtgtcattctggtttttgttgtatagatccttggaaagcccatgtcattcctgctgtgaggtacaggcagccaaatggcatcatctctaaacatgccttctcctggtacatcaaattatggaataaatgaaagccattttgacagatattgaagatataagtttctactcttcccacacatgcttctcccaagtgaaggattttactggtgaattgttattagagattagtgtggatcagtgactctgccaggggaaattttgccctctaggggacatttggcaaagtctggaaacattgttggttgtcagagctgggggagggagtcctgctggcattgagtgggtggatggtgctgaacaccctgcagttcacagagccccaccagtttgaccacccaaatgtcaatgctgaggagtggagagccctgctgtgccctcccgcagcttccctgaagcttcccctcacctgctcctcccatgtctccccaccacttccccacttcacccgcctccttacacctcagtcccctccacctgaactcaccccttagtccaaggccagccctgatctccgctctcctggtctccttgctccttagcaggaggcgcccactagatggcgcccttgcccttactggagctcaccgtctccctttccaccctgagacaaatgtggctgcttttactgccacaaccccagccctccacactctagatttgctcagggagcagctcctggacagacctcagggaccccagggaggagcctcactctggagattttgatggcatggtctttgaacttcactgttacccccagtcaggatccaggatgttgggagtgcatgattctgcccggtcccacttcagcaggaccccactgctgagttgtctgtggggacccgggcctctcatctccttcttgcattgcaggagagggatcttagcactgctttcacataaagtcagataatggaggagtgcaggtgagtttgggaaggtggacatgaagagaggttgtgtccctagaggtggcagcagtgagaggatgggcaggtgggaggaacacagcccatccagggttgccagccatattaggagcgacagcctttcctctaagcctccagcctttttcctgaaacattccagaactttccacttcagcacttcccactgaggctcctcaggtctgtccctgagctcccagctgagcctacctacccatctgaaatcctgagtcctgtgtcaccctcgttccccattattctgtgcagttctgtgggacgcccagctctcctgacacccccagtcttcagaatggccatcagcgctgtcgctgtggcaccagggtgactgccgcctggaggctgagtcctggcttcctgacagctgtggggcccgctctaggctcccttgtcctgatcattcatcacctccaggatgcacagcagctgggccagggggaggagcagggacaggtgtcagccaccctgtgtgtctgcaagtcaggctgggggtgtgggaggacgccaggaatgactgaactttctgatttagagggtgagagcttgcactgatggaatttgggatttaataggaaaagcatagcgttttcctattttgtaggcagggtggctggagtttggaatcatagattcccctgggatgtcactgtggacctcagtcccacccgttaggggcacagatttcagaatccacaccctggggcaaagcaggcatgggaggctccatcagcctggccagggctctctatttgtgcagctgctgcaaggagatgtgcactctgatgggaacagtgctccctcctccttggggggcagtatctagctccctgcagcccctctccctgcaggccctgccctctctgaacctcaccttccccaacccgccccccgcaatcccatctcagctgtaatcccaacactttctcatccattatgggtggactgcttgagcccaggggttcaagactatgctggctggacaatatagcgagttgttgtctctacaaaaagacaaaaattagctgtgcatggtggcatacacctgtagtcccagtcactcaggaggctgaggtgggaggattgcttgagctggggaggctgagttggcagtgagttgagattgtgccactgtatacttcagtgtaggtaacagagcgagaccctgtctcaaaaaataaaagtaaaaaaaaaaaaagaaatatggaatacattattgttaactctaatcaaccatgctatgcaatagtccaccagtaataccagtaatagccaataatgaattatctgaaaaagaatacaatttattcttagctatctactgctaaaatttttaagctatcttttatgatagctgaaacaaaagaagtaaatttaaccaaggaagtaaaagacctttataatgaaaactgtaaaacattgatgaaataaattgaaaaagacacacgcacaaatagaagatattccatgttcatgaattggaagaactgatattgctaaaatgtccttaccacccaaagtggtctacagattcaatgcaatttctgtcaaaacaccaatgatattcttcgaagaagtagaagatcctaaaattagaaaccacaaaaattcctaaaacctgcacaaaacaccctgagttgccaaagcaatcttaaacaaatagaacaaagctagtggcattacacttcctgacaatcaaagcatactgcaaagctatagtaaccaaatcagcatggtcctggcataaaaacaagcacatagatcaatgaaacagaataaaaatcccagaaataaacccatgcatctctagctaactgattttcagccaaggagccacatgcacacaatggggaaaggacagcctcttcaataagtggtgctggggaattggatattcatatgcagaagaatgaacctagaccctatccctcaccatgcacaaaaaattaactcaaaatgtattaaataaagacttaaatgtaagaactgaaactatgaaactactagaagaaaatatagggggaaaatccatgacattggtctaggcaaagagtttttggataaaatctcaacagcataagcaacaaaaccaaatataaacaaacgggatttcatcaaactaaaaagcttttatacagcaaagaaaaaaaaggccagcagagcaaagagacaacctacaaatgggaggagaatatatttgtaaatatatacatatatatttgtaaatatatacatctgataagaagataatatccaaaatatataagaaaattatgtttctgtatagttttatctgactgggatacagaggccacatccacagtcccatcctcaaaggccacttgttcccaaaatgtcaagcacatccctcaatgatccatcatcaacacctatgtctgtaggatgaagggtgaatcatgaagcactaaaaaggaagaaggaagccaatcccaaaacaaaatgatgcagggtctggaaagtccaaagcattttttttttttttttactgcatcttcctcctttcttctccacattcccaatcctcactattgattaacaaaacaaaaaaaactgggacccaccatcttccctactgtcaggagatctagcgagattgtttgagtcttagaccaaactttgccataagccaaatttctggctgactttacaatgatatgagctagcacagtctctttttctgccagtcaacttgtgctcggttttatttgcaaccaaatagaggtggtaaccaaatataggtgaccctaaaattagtcatcaggatgaaatcctaaaatgtgcaacaaactgggttgaattcaggattagtagcaacatctctgttgtgggcttgaaaagggggcacccttttatgcagtagcaaaattgctaaattgttgtttgctgagtctttggactctcatcccggattttctatgaccattcaaacagggctgcaatgaacatctatggttgtttagcttggcacacttctacatttctatatagtaatatctagaagtgcatttgctcaatcacaagatatgcacattttataattgactgctatcgaactaccttaaatagccttaatttgttctcaacattgtttaacagggtctgtttaatgtcctacgtccagcaaggacagtatcacttttcttaatatttttcaaattattggaccttaacaaatacttaatgtgcaattaattgattcctttgtattcccatgccttcttttatatgtttccttatagtacacaaaaccacattattgtttctttacttgtgtcattccaccctggaccattcctatctaaactataacattatgagagagagagagagagaaaacaatatgaaaatataaattgattaatcaaaaaaatttaaataggacaaatcaggaagacacaagagagattttaaaattattcagagaataccacaatagctgtaccaatatattttaaaacttagatgaaacggacaactatctcgataaatgtaaattaccaaaactgactcatgaaaaaatggatattatgaatagagcaataatcagtaaagcaattaaaaagacagttgataatttttatttactgacaacaataacaaaatttcaggtcctgatatttttatggtgaattttaacaaattttcaagctcctcctcaaccaattctcagaaggtttaaaactttaacaagaaaacactttctaacacattttcagaagctgttatagcatgataccaaaaccacacaagaaaattatagaccaatctcacttacaaatatacatgcaaaatcaaacaaaatcttagtgaaccaaattcagaattaataatagcaaacaagcaaaatatgttatcatacgtatggcttatatcaggaatgcaagtatgtttcaacatcagaaaatacttctccacattaacagactaaaggagaaaaacgcttgtttaattatctcaataggtttttagagaattttgaaaattttataaagttatgcgtattctgtaaaattgatgaaatccaaccttgatttatttttaaaaattgcctttcctatagaattataggtaaaggaaacacatgcatcctcacagagctacttcaaggctaagttacttcccataagtaacgtatcctgtaatgtgtgcttggcacatattcaatactaaacaaatatttgcaaatcctcaaaccacttctcgctcaaataacccacctttgtcttttgcctttatgttagggttgattttctcaattgtatcttggagatcctttggtgggtctttcagcaattaccctgaatttgcttttctgtttacaattttaattcctgggaactctttcttgttctctgactgcacccttttcatgagagttcagccatcaatcctccagaaccccaccccccccgcccccccaaaaagcaataaagatgtctaaaagcttccttctgggctttcgaatgatgtttaccccaggcatttgttctattcgttcatcacccattttccctacaacttgcctacacttgatatcagatttttatttattagtcacctatcttcttcattggcccattttcctattttgccactggttgttctcaaatgtgttatgattcctggttgtacagtcaagtggttgataatcttggatatacgataaagatttgctctgtagctgtgtgtaagcctatataaaagcttttgtatttttcttcttaaaaaagacaaaagatggttgggaagatccctccagttcaccagttcgaggctgcagtgagctatgatagcgccgctgctctagcctgtctgtctgtgaaaaacaaggggggcggggggcgggggggaagactggagatgtaaatctcccgcagggccctacccgtatccgcaacaggtctctaacaggaacagcctcaggcctgtgttggaacaaggtaggttacagaaatctggaagccagatctgtaacttcagggtaaggactggctctcagggctgatcccccgggctgggtgtcccagaggcacccgcccccgccccttccccaaggcaggccaggacaccttcactcctctccttaggctccccacccccttctcctccccactgtgcctcctggagtagcggtggcggtgccacaggggagcggggcggggcgggctctgagggcaagggggatgggccccgccggggtcactggcggccaccctggaaactcgacgcaggccggcccttctagtgaatcgtcccagccacagctggcctcccagccgcgcttggggcgcctcggggcgcgaatggtgcaggttggggagactcaccacgcaccgtcgggggtcggtccggttattcctcaccgctcggctccagtgggcgcgcgggcctctcctcctcagttcctgcgctgcagtccctccctcacccttcgcagcttgggaatccaactgtgtcattccgacggagcgccgtgaggacctccgagggtgttagcgccaagtgatctctgtccagcgctctgaatatccaagtaaaggagttcaatgaagggcgggtcaacggaggagaaaccgtgactctctcaagggagcccaaggcctccttgtctaattagtgacgcgccaatggatggaggctcttcccaccatctcttcccagcatccagtgacaccaccgccaagggacgggctcggcggaacctgcaggaaagaagcatcggctgagcctgactgcagcgctgtgaagagacaggggaggggatcagtagttggtcccgcgcccaccccctgtttccgcgaggggcggagttgactggccatgcaggcagagggcgaaatgtgaaattccactactcctaccgtttttccctgacccgatggggcggagtgtcgtcaggctaagttccctggcggtaaggtggggagattgaggcgcacacctgccgaacggtaacgcaggattagctaaggcgagctcaggacagaagcctcccgaggagcaggagggcaaaataataaataaataaataaataataaataactcactccttggtctttatttgcggcaggaattcagaaggtgaaagcggggccttaggatctttctgaccttttgggttttaagcaggaggtgtcagaaatgttaccacagggctagctggcttgtggccagcaagcgttcacaatgccctcgatttttcatccctctctgtgggttctttttttcattgtaaggcagaatttctacgattgctcacccactcagagaacctgagctggtttagaccaggtgagacaggctaggtttaccctggtgatgatgtgttgttgccatggcgatcctgcccagtaccagaggccctgcagattcagatgcttggtgcctgtgcttggctgaggggccaatgggtgaagctgccatctgcgggatgatgactgaagcctctaagtcagaatccgcccaggctgagccttagggcagctccatggagcctcggctggcctgggatagagagtccaccactgtgccagcccccagccactgcctaggtcctgtgctgagagccccttgtccagggaaatggcgtccagtggaaaagggaccacccccttgcccttcactcaaggcaggttggtgacaaccctgaagctaatccgttcctagaggagctgcttctgggtccgagttttctctgcagcagagcagctccctggatgggatctgttcaaagtccgcctttcacgcggaattttccgtccttgcaattttccacctccaccactaggggatcctctctgaccgcctcatgccggctctggcctctgagcaggggtttctcttctgcatgtgcgaccttgcgcatgcctagtggccttttgggacctagagctgctccacaccccgatggggttacagagtgcctcgcctccactccaccccaccagggttccttccctggctgggatgggatttcagaagcgccgaggaacagcccagacaggtgtgggagagtagccaaggcccctgtcccggggtggccaggacagcggtggcctcgcataggacctggctgggctgctgcaatcagtgtcctgccccttggagagcaacagtgaaaacaacaagactatcttcacccaccttaagaaagaacagaaccagtatccccaactctgctgtgtatcccaacccaattccattccccaccccactctcagtagccaatatgcaaaatattagaatactcttactgttattattttcaaccacactctgcatcctgaaaaaccatatatttcgttatgtgcttttaaacttcttgaaaatgaaatactgaggctgggcgcagtggctgacacctgtaatcccagcacttcgggaggcggaggcaggcggatcacgaggtcaggagatcgagaccatcctggctaacacagtgaaaccccatctctactaaaaatacaaaaaattagccgggcgtggtggcgggcgcctgtagtcccagctacttgggaggctgaggcaggagaacggcgtgaacccgggaggtggagcttgcactgagccgagatcgcgccactgcactccagcctgggcgacagcgccagactctgtctccaaaaaaaaaaagaaaaaagaaatactgaattttcaaatacttgctttttttttcggtcaaaattatgttctcaaatttcactcctgtagatgtgcgtggctggctgtagtttttgcatttttattattaggtattctcctgttgcattaatatgccacattttatttctctcatgtttttggtgaccacttggggtgttttttggttttgtatttttgctgtatacatgctgccatggtggacatacctctttatacatatttcctgttgtatgcagacacaattttaggatgtgacatcttcagcttttctattgtgtcgtgtgtcttttccttcgtgctttgtgttatttacatattctggacacagattctttgtcaactgtatgtgctgcacatctctttcccagtttgtgtcttcttcttcttttttttttcttaaaaaaaactttctttatagtgttttttttttctttctttctttgttttgttttgtttttttgagatggagtcttgctctgtcacctaggctgaagtgcactggccgatctcggctcactgcaacctccgtctcctgggttcaagtgattctcctgcctcagcttcccaagtagctgggattacaggtgcctgtcaccacacccagctaatttttgtatttttagtacagatggggtttcaccatgtttgtcaggctggtctcgaactcctgacctcaggtgatccaccctctttggcctcccaaagtgttgggattacaggcgtgagccacagcacctggcctgtgttctttcttaagtagatgttacttttaatataatagaatgtatcatattttgcttttatattagtactttttctatctaattcaaacacatccccaagggtctttgtgtgtagactgaccaatttctcaagaatcatgaatgaatactgcttctctttccccaatttatctgtaatgctacctttattataaagtttctatgcatgtgtagaaatagttcctgatttttcactctgtgccaccagcataccaatagcacgctgtcttaaatattaaatagcagagctttatgagacaacttgatgtgcagtaggcaattgcccccttgttactcttcttcagggttctttgttgtaccacatgaattttagaattggcttgtccagctaaaagacaactgcaaggattttatttggaagttcataattctatacataatttggggaaagtattttcataataccaagtcttcctattaatgaacacagactctctctctctctcccccacccccacctgtttagttatttatatctttatggtctgttagttattgtttattgtctttcaaccaggtttcatgtttttctacatagaggccttgcatgtgaaagtctttcttcctagcttgctattacaaattttttttaattgcactttttgggtacagtggcttgtactgtaatccccgatacctgggaggctgaggcagatggattgcttgagtccagaagttcaagaccagcctgggcaacataatgaggtccctgtctcaaaaagtttgttttaaaaattgcatttgctgttattcaacaaatgtcattgtgtctcatatatggatttttatatctgataaccttgttcaacaatcttttgattctaacaatatatcagattcttttgagttttccatatagacaataatgtcatctgtaaattataattgtttcttctttgttatttcttggaccttttattttatatttttgtcttgctgcaaggcaatatccctctatatattgtggggtcttttttctcataaagtggggatggtgaacacccttgtcttgctctctgattgtataaagcatgctttctgtagcattttgtagacgctcttttttagattgaggtaattcacttttatttctggtttactgagtttttagcataaattcaggctgaatttgagctaaagctttttctggagacatcatttgaaaaattcatatgatttactttctttaagtcaccaaagttatgatttacattgaactgagtttctactgtttaactgtattcttgggagaaaacccacttgtcactgaacaatatctgttttatttactgctgtcttgtgtctaaattttcttttaggattttttgtatatgctcagattagcctgttattctcctttctgtatttttttctggtttgggggtcaaagttataatagcctcacaataagagctaagaaaccagccctaatggaggccggggcaggaggtttggagttcaagaccagtctgggcaaaatagtgagacccccatctctatgaaaaatagaaattagccaggcatggcagtgagtacctgtagtcctaggtacttgggagggtgaggcaggaggattgcttgagcctaggaatttgaggctgcagcgaactatgattgtgccactgtactccagcctggatgacagagcgagaccctgtctcaaaagaaaaaaaaagaagaaataaaaaggaaaagataaaagagctaagcatctgtttccttttttccattttctgggagagtatgtgtaagactgtaattaactgtttcttgaataatgggagaactctgtaaaataatctggctttggtgttacctgtattggaaggatgaaaaataccaattcagtttcattattggttgatagggctactcatgctttttgttttgttttgttttgttttgtttttgagaggaagtctctctgtattgccctgttgtccaggctgagatgcaacgttgttcacaggcctgatcctggctcactacagcttctaacttccgatctcaatagatcctcccgcctcagccttcccagtagctaggactacaagcatgcagcatcacatccagcctcttttcctgcctgacccagttctggtttcctttagttttctaggtgttcatccattttatctaatgtttaatgcatttggcataagggtgctcagtgtcctttcattgtctgttgtctgtaactgttgccattttcattcctatttatgagtactggcgtcttctctcactttttcttaataatcctgctggaactttgctttttaaagaacatcttttgacttgttgattcttttttcatacatattaactattttcttattttttgcctttatatttatttcttttcctgtttgaaacattgctcttttcttactataaaaatgggtaagtagctcatgaattaccacctcttttaaaaatcttttctactgtaagcattttagcagtttacatttgcccacaagtaccacttcagctacaccctatgtgcttttacataaagtcttcatttttggtaagacatattctcaaattttaattatcacttgtttttaaatccatgatgttttatttgaaatgttgtttctaaagatacattttctggttatacttttattcttctaatttagcacagtggccacaaaacatggtctgtgcagtgcatacaatcgatgagtaatttctgagctgtagtatttggcataatatatggcaaaatttcctaagttttccatgtgtgctttaaaaaacttccagtaaaatacataaatctgttagatcaagcttctcacattgttcaaatagtctatatgtttactgattcatttgactgcttgatttatcaattacaggtaggaatgtattcaaatctcctattaaagtgtgacactcaagtggctttttaaagacagagatgccaaaccaatgaatacatgattttccccaaagcctgcacaaattctctaatgaaattttaccatgaaagtttgtttaattaaggcttactaaagcagtatgttgtcttttactttttaaacagagaatatatattttaatacatcgtttaagtttatgattaattatctattactgaggataagaatctttgcctgtgctcattcagcatttgcacttcatttatgatctgccttctcatagcttctgttaatttttatactagagacatttatttgtttgtataaatgttgaaggtttttttttgttgttgttgtttttgagtcagagcctcgctctgtcacccaggctggagtgcagtggcatgatctcggctcactgcagcctccatctcctgggttaaagtgattctcctgcctcagcctccagagtagctgggactacaggcatgtgccaccaagcaaggctaatattttgtatttttagtagagatggggtttcgtcctgttagccagggtggtctcgatctcctgacctcatgatctacctgcctcggcctcccaaagtgctaggattacaggtgtgagccaccgtgcccagctgggttttttatattataaggagatgtaatagatagatagatgtttcaaagatagtcaaatgtttttaaaatttaaaacacttttttacaggttgactttcaccatttaatttcatctatgtgttttgccttagagaaattttaaatgctatgtagatctcatgacttataattatgaagcattttgttttctgttttccacgaaacttagcttaactttgagcatataatagttgtaaaggtaggagagtaacactgaaaaaaggaattgcataaaaatggcacattttctgtagagttgtttatcgcctgaaaataggccccatttcatggaagtaagatgatcaggctcaggtccccagacgaaactcttggcatggtttttggagatagtccagggctcagtactggctctatcatttgctacttctcccaaagtaaccaatatctcatccaccctgagcccatttccatatctctaacatgaggataatagcatctaccttacacaccaagtagagggatcaaatgtaggaactaaatcaaagtaccagcactgaataacctacatcctcccacttcccaaaaggaagagagatgtatcccctgttgacaaacgagaccattttgcaggagagaaaggaaatgccagttcacttgcaatgtaaacatgctctctctttttagggatgtccagggacctgagagagaacccatgcttaccaaagagtttctagttccagacacacaggactcgaagggtgacaagtatggttttcagggtccctgaatccacccagtcctcacagaaactcctaaaagctgtcgattgacagcgttgagttcacagctctggtcctcacatgctgatactgcttgtgatatcgaacccgacaggaccccacatcacaattgatttaccaactacaatataatacctcctgaatctccaaattggctcacccaggaacaaaggcttggggtaaaactggattaggagatataagctctgaattttctgagggtgagacacacaaggattctaagtgacacgccacagagtaacgggtctgtgactggaggacccacagatttgtcttactggagacaccacatgcacacaaactccatccttagctgtggaaacaagggtcttttgctatcttagccgaattctgggagtaatttttggaggggaggagatctttgggattgcctctttcaggccctttacaaaaatacctacttcttaaatggtaaagcttacactaaactgaaaaaattacatccttggctttttatgaagtaggtgttggattgaatcactactggaagaagtatggcatcgcaaattctaagcagtggtcaaaggatggatctgttaaattagaaaaatctctaaatttataaaaagattttagattcctttattctaaacaattgacctatttgtactcatgggacaatcaaatttcaaaggagatatgtaacgatttcatggcttgcattaaaaatccttctgataaaattaaagataaaaaatctgaccccctgccaaaaaaatcttttgaagttcatactgcctgctttcaatattctgtgggattcacaatgaaaggtgccttatattgtggcctagcttcaagtttatgccttcgccaccatggcctgggttcaattcccagtcagggccccagcgcctttggtttaatgtttgcgtggcatttgacttttttacctatttagtattggtgagattacctttggtaaaaaaaagtttaaagagtggaaatcgcaattctttgtgttggctaaaatctgattataagagatctggaaggttttatttttctttttcaaagagctctatggtcagaagtcggcttcatgaaaagctaatatttaattatatgtacatacagtctttctggattttctcttttgcctcctgttttgaaaaatatttggatttgagtgaaactccgttttagaaattaattgcttggtacaatatacccatgtaactaccctgcacatgtaccccctgaatctataataagagttgaaattttgacaaaataaaattagattttgaattaaaacaaataggtgcttggttcctctgctcacttctttttaaaaggaattcctctcccatgtacttcttcttttcccttctttaccttccttttggcatctttggtatcacatgaagggatctagagggaattttaagtgactctgaaattccttgagaaatacacaaaaagatcccactcaccccttttgggggtctcctgttctccttgtggagtccagagtcagggacaggctcctccaggtctgcagctctgctctcttttatttcatcttggctgattgctttggttttgtgagtaccaggcattactttgtactgtgagagacacgtcctttgtgagtgcaacggctgctgggtcactggtgagggctgcagtttggagatggctgagagccgttgcaataaatggttgtgattgcagggggctccttgtttctttgcaagtttagatgagaaaggtgcagtttggacacagtttaaaggctgtgaaaacaccaccaatgaatatgatttcctttggggatggtctgattaaaagtgggctgattgttgctgtgctactagccttgaagacatgtttctacagcattgtgcagtgtggaaaaattgtgtggcttggtcttgtggcatgtcccttcttttagagacctcagattcaatgtgaaattcgggatttttgattttcaaagatctagatgccctgccttccagatgtgcctactcttcacatattttaaaattagatcctataaactgcaaatactttgttggcttctgtgagatcagaggtccagttagaaaaggaagacagtttgttaaaattaaaaactatttatctaatctaactagattggcctccaaatatgactttctgacattcagctggttactctgaaaagatttctaaatctcttgaggctcatctatatgtttccttgcaaagaaaaaaaaaaaaaaaaaaaagcaagcccaagcactagtaagaaaaagatttgcaatgtttcatgaaaggagtagatgagtgaagcatttatttgtagatactgggttggatacctgtgcaaagaagaagaggtcaataataaaaattgccaggggatttcttggaacttaacaagctgaattaaatatagaaatgtcaggaaatcaaggcaggaaatactcacttgtggttaggcagacagggcagggttctgagcttgagatggagcaaacagttgtggtgggtgaagttcacatgctttagagctcagctgtcctagtaaagaagcctaagagtctctaaagctcttatgagaagatggattttttttgcctagattaaaaggttaaagaattgctttaagttggataaaataaagctaaatgtttaagcaagttgtgaaaggtttatgaaaaaattaattaaaatatttttgtgtgtaaacatattgactaaagttgaaggggtataattcagcatttctgtaaattgagcattgaaataaaaacacaatgggtttctcttagagcactaacctgctctttaacaaaaattgtaaagggttatagaaagtctataaaaatgttaccttatggtcaaacattaaaattgggtaaatatgtctatcaggttttattaagaattaggtttaacattaatagtacactaatgtaaaggtgaaatttggcttatttggtacaaaaatcatacaggaagcattgtgaaatataaaatgatttttagctttctttgggctatatttctataaatatgttattgatgagggttccaaagttatgggagactcctataattctgctatatctcagtgtacattatcagtcataattataattgtcatgttaaattattgtgggccacagaggtaacagatttccttgtcaattgtgtctttgactatgactaccctaaaacgttcagtcacccatatacacatgttaccttgttttggccctctttagaaggtaattttataatcagctataaagccctaacaggtgctcttaaatgcaaattttgataactttggagattgtgacatcagaagagaggaaaaatgttcgggacacttggagagctaaaatgttcattgatatcaagcaggacaggaattaactgcatgaagtgaactaataggaggctgaagtgatctttttgactttttgcttaaaacgttgctgatcctttgttttgcttttcagagtcaaggcaaattttcttttgagctattgacagcttttaacgattaatcaaaatatactcctatgaacaccatttggagcattatttgtttctctctacccgatttccccagaatttggaaactatttgtgggtattcttaatttatggcaatatagttatttgcataagtgcaataagaatgtgttttctttggtaacaggacacaatttgaaaaactggttattttaccaaggttttgaccagaatgctgtgctttcctttaaggaatcaaacttgacttgtggagctaataaagcctttggaaaactgaccttatatcctgtgaacacagtccctgtacagggttactgatctgtgggaagaaaagaatgtcacattctgacaggtcaggaatcccaagttatcttgaaacttcaagaggacaggaattcacccaaccatatgtatttgatggtagaaatccatggcaggggctcagctttaaaaagtcttatctcagattccttctataaaacaaagtcccattaaaaccaattttaaaagcctatgtgaaaaataattattcttgctgcacctcgtacaaataaagtggcaaagcataataaagcaaattggtcctgtcgtaatttgtctttagtaaaaacgggaaactggggtcgggtgcagtggctcactcctgtaatcccagcactttgggaggctgaggtgggcagatcatctgaggtcaggagttcaagaccagcctggccaacatggtgaaaccccatctctacaaaaatacaaaaatgagccgggcatgatggcgggtgcctgtaatcccagctactcaaggggctgaggcagggaagcggaggttacagtgagtcaagatcgtgccacttcacgacagcctgggtgacagagcaagactccatctcaacaacaacaacaaaaaagggtaactggagagagggaagttatgtttcaaaaacttttggaaactatagtacacctgtttttaaattctagtctggcattcagtttttattattttctacagtttgggttaaattcgtatttctctggctacaagtctcctaaataatcttttcatttgtttcctttttctttccctttttccccatttttcttaattggaaatcactgaaacctaagctgtgctttcttaaagccctgtgaactgaagactagacaaccgaaacttctgaaggaagtagcagcaacctatttatatgtgttgctgttgcctactattatgttttagcaggtgctgcctctacacccccgaaacagagagtgctactgggaacaaatcgactttttccactccagtgctgcattcggtgccccataacgatgaccccctctcagcaggaagtagccagaaagattacaatgctccatctccctatgattcttgtgataaataaatatacaagcatgatagaaatcatgcgcaaattgacagtggggattgtggcaggccagatttcactaatggaggtccccatcacaactacttcagtactgactgagtggttaagttcagtatcaaaagctgaaagtgccagcgcctttctacaaaggctagaatgtaacaaaagcccaccaagggttttacctaggcctttcctgggccttacagcatgacaaaacaaagaaggaattcttaaccagacctgtttaggattaaacaaatttaattgggggtctgaagaaactcgccaggcctccacaaacaagttcattgggggtctaaaggaaccccccccaaacctctgtgattgagcaggagacaaggtcagggtaattgccccagcacctggactcatttagatttaagtaaatgtactgaggctccagagaaaggtctccaagacttagactagagttacagattaaaagaagttaatcacttatatctttagataaatgcacactgacacgtagacatacatcttagaaaatatataagctctggaaaaccttgtaatttacagttggtctggagatattttctgggccttctctctgtaaccggttccagaaataaaaaactctcttcctccccagtttatctgcatctcgttattgggccgtgagaaatagcagccagaccctgagtttggtctgggaacacactggctgggcttcctgcctggcggtagagcttcactgtcctccttcccagccaaaatgtggcccttgaaggcttcctccccaactgaccggttttgggttctaggtactcagggaacaccgtcttcaaggaggccattttcatactgttcctggtttgatttttctgaaattaggaaatgccccttgaggcatccaggattgtctttatttcccctgaagcttcccctcctgaagaaaaaagttctcaaacaccctcaggactcaaaccccaagttcaccctgtgaaacattcccatttcctaaacccaggcaggctcatggccctcagcctctcagaccccatggaaacctcctcccccacttcacgggttctctccatattgagagcctcccctcctcggcacacaacccagagactcaccccaacatgtgtagcaaatcaccctggaaacaatcatggctgaacgtggtagcccatgcctgtaatcccagcactttgggaggcccaggaggtggatcacctgaggtcgggagttcgagaccagcgaggccaacatggtgaaacctcgactctactaaaaatacaaagttcactgggcattgtggtgtgtacctgtaatctcaactactcaggaggctgaggcaggagaatcacttaaacctgggagacagagattgcagagagccaagatcgcaccattacactccagcctgggcaagaagagtgaaactacatctaaaaaaaaaaaaaaaaaaaggaaaaggaaaagaaaaaaaaaatcatgaggcaacattgcatttaacaatattttatttatcaaaagacacttgtctttctcaggtaagtgaaggtctagagatgaaacgagtcccgatgtaaattgccccatgggcattgctgagatcacaagatcatcactgcagcatgcagcacaatagtaaatttctcaggatggaagttcaacaatccaaaaggtagtattttttttcatgatgctcagtccatcatacgaaataaaaataaattccttttcatgatcatccattcagtagaaaaaatgatagtaaatttgttctcatgaagatttttaccgtaacatataggatttatcgttattattattattctttgttttttgtttttttgaagcggagtctcactctgttacccagtctggagtgcagtcgtgcgatctgggcacactattaacctccacctccagggttcaagcatttctcctgcctcagcttcccgagtagctgggattacaggcatgcgccaccacacccggctaattttcgtatttttactagagatggggtttcaccgcattggtcgagctggatttgagctccggacctcgggtcatccgcccatctcagcctcccaaagtgctgggattacaggcgtgagccaccgcgcccggcctcaatttatcattattcacgcatccacaaactgggttcttatattttgtacgtgattttttccattgaggagagatatctgtgcatattcatgctgctcatatttcatccacaaactcggttcatatttcatccacaaacataattttttccgttgagaagagatacttgtacatatttatgctgttcaaattcacatttcatcattcttttacaagaaatagataatgtattttaaggttttccagtggtattacagatattttactgggtgtatagatagaaattaaaccaaacttctttgttctggccgccagtcatgcatcctgttttcaacatagttcacatacaactggttgtgtaaaaatgaaattattttgtttagtacaatcatcaacagttggttgattagatttttaattatcaagttaatcattgtcattatgcttctcatcgcactcgtcattaattgctgtgggaggaaatttgttatgttccctatgagagggtgtatcacaaattcaaataagaattcaacgacaatggactgtataaaggaaataagcaagtccatggaaaacatatttttttccggaaaggattaaaatatttttaaaaaggaattaaaaaaaaattgggcacggtggcaaatgcctagagtcccagctgctcaggagatggagacagaaggattgcttgagcccaggaataagttggaggctgtagtgaacagtgattccaccactgtactccagccagggcaatagagggaaaccctctttctaaaaagacaaaaagaaacaaaacaaaacaaaaaaacaccacatcaaaaaacccaacaacaaaatgaaaaaccaaataacagcaatacaattggagctattcgatccaaagaagtaaatgaaacataaagcaaataaaagagaaaagctaatacctgtgtcctgcaggactcagtccaagttctgctctgactccctcctggtgagccaccccttaaaaagtcacttggggcggggttactttgacagacagtcttctgtcaaagagggaggcggtaaatagcacttttttttttttaatttaacgcctttccaacaaattagcggctatgttgtctaagagtgcaaatgtcagaggtgggtacaggcagcaagaccctccccacaggggcagcagaaggaggaatgactaagggaacaagactttagtgtgctcaactacacaggacaggaaacagatgctttttacaaaagctggtggacttgaaggcagaatattttcaagttcctgtaactgcgaactatgacctgtagcctgtgagagtgactttctgtggcaaaggagcttttgtgaatgtgaggaagttaattatcttaacagtgggaggttctcccggcttatctagctagaccctcgtgaaatcccaagtgtccttaggaaggggaagcagagagagatttgagtccagaagaggaagaaggtgatgtgaggcccagtaggggaacaaagggcgatggcatgtaaacacttagcccccagaagtgggagagggctggggttcatcacaccagaatccctaacaatcagccttattttaattacccttgaaatggaaggaggccttagagagccagaggcttggaggggcaccctctgctgcatacacagatcccaactgctgtgggctccaaataattgcaccagggaaatcacaaattatcaaaaataaaggatgtaaagcttttaaaaaatattaaaagcccaacaaataaaaaaagttctaaatctataaaattgacctcagtctgtatatttagatgagtcatgtgtatatagcgtttcacttcaaaatatatgataaatctctcattcattggcttaaaaataaacacttcaatcaagtctttatcagaaaaattgaaacgttaactcaattgccttttagttcatgtgactttacaaaacttaaaacaataaagtcagttttaaaaattattagtaaagtaaaagaaaaatatcttcacaatgtagacattttgtccacatgagacatgtgaaatattgccattactaaatatttgcaggtcaaaaactgtttccaaaacattttaaataatcatctggcctgtctgttttagagcattcaattctagctgaggtctggggacatgtgaaaggagccacggcccgactccgtgctgggaagagtcagacattttccacagctctgtcctttgctgtgggctctgcaactcctaccaattaaaattgcttacgtttttgttttatttttactaaagaggggttcctaaaagctaacattatactgagtatatgtaactaaaactactaagaaaacaatttcacaattatacaaatgtgccaagtaaatgaaaaaataaactgtattttaataaaggttataaaaagaaaaacatatagtggtgtgaggactgtctcaggtcttcactgagcaagggatcatgacattctatggcggacagctgaccttggctttctgctcctcttgattatgtctactaagtgacatacttactctttttccacctgtcttgcctctaagggtaacaggttttatgagatccctcctagtgctttgcaggtcagcctccctttgctgcattccaattttactgcctataccctccagctggcttttgatgacaaaagtcctggtcccagccattctcagattctgtcatccccgtgggcactatggagctcagcactatgggaggttccccaaaaatctcgttttctatgaggaatggccaccacctgcatctcagtgatgctagtgacccctttcctactcctgtgctcactggtcctcatgaagatcctggttggtctgtagccccctatttttcctattaaagagaaattacagtaagacccatttgtgtgcaaaatcaattttaggcttattacacttggcctgataatttgcataaaatgcagcaagaattcatcggccatataggctacttttgagttaattttcctgggtttttacctaaaaatatactattttggttagagtcttgtgaaaataaccaatgtgttcaattgttttattttaaaaggctcttactgaacactataaatatgtataagttgaatatacaaactatattgtcataaaatcacaacccaaaatgtggagaacgcagagggaaaggtaaatttgctcgcaaaaacatacttcacccaaataactggaaaaaaaaaaagactttcatgacccttctttaaccagagcagcagctttcaaacaaggtgtttgccttggaaatgccattcacaagccaaacggcccttgagagctgtctgtcaggcactgtagaatctagcagctcctcacagagttagaaatagtttcaggaaagagattccctgcttttagtaactgcactttatattcccagatagcgagattgtatgtaaaccatttttatcttattctggaactcttttgggtactttttttttttttttttaaatgatggagtctggctctgttgctcaggctggggtgtagtggtgcgatttcagggtatgagaaaatgcagctggacctggctctttccaggaagaccctcacagccaaggagtccaaagcctggggttttcatctaattccagtgtgactggggtaggagcagctttggtgctgggtgtgtgtgtgtgtgtgtgtgtgtgtgtgtgtgtctatgcctgtgtctgtttagggtgttaggctcgtggttgtctagatacaaatgtcccagggctcaggagccccagggttatgtcaggggcaccagatgaaggtgtcaacagaagttagggcacaagggacaaaggtgagagcaaggttagattcatttaggtgcaagaaatcatagagggaggagggagaggaagccctcctgctaccaccgaggaagaagcgcagcttaaggcagaaagcctgtccggagaggaagtgagtttgagggcagggctctctgggtaaagtacggtctgggacaccagcctgggggaagggtacagaatgcagagtggcctggcgtggggactaagaacagaggagagcagctttcactgggagggtcagtgttttcagtgtccagcactgagcaaggtgagatttgggcagcttgctgtgaaataaggtcaggctctggcattgtccccattgcgtgtgtgtgtgaggggcactttgggagagtgaactctccacctccatcctctcatacgtccttcaaccgagcttgccagttaccctgattccaaggagatctatttattgttgacaatactggatcctagcagaggctgggtaggagcctgggcacaagcaagtggaggagggggcctgggcctgaaagacctgggaggtttgagagaggacacagcccacagaatggagcagatggggtagagtcggcaagcattcagggctcctagtaagttggacaatggagaccctgaaagatccagtaaaacggggagaacaaacaggtccccaactcacatccttgcagtgcctggagcttcagactccagacaggtggggaaggaaaattgagggatgtgaacatgttggagaatgtcgtgccctgaagaatgaagaaaaggggggtgaggaatgagagcaggaacggcttccagtgcctggtgcccaggagaactcagaaaatgggtgtggtggagaggaatcgaggaaccggaagtggtggaagtgtgcagggcccctccgagatcactgtgactgccaggcgtcctccctggctggagagcttcactgtcctccttcccagccaaaatgtgtcccttgaaagcttcctccccaatggactggttctgggtcctatatatttgaaggggtggcctgcctctccacacctgtgggtatttctagttgggtgggaggagagacagagaaaagaaataagacacagagacaaagtataaagaaacaacagtgggtccaggggaccagcactcagcacaccaagggcctgcaccggcaccggcctctgagtttcctcagtttttattgattattattttcattatttcagcaaaaaggaatgtagtaggagagcagggtgataataaggagaaggtcaatgaaaaacatgtgagcaaaagaatctatatcataattaagttcaagggaaagtactatgcctggacgtgcactcaggccagatttatgtttctctccacccaaacatctcagtggagtaaagaataacaaggcagtattactgcaaacatgtctcacctcccgccacagggcagcttttctcctatctcagagttgaacaaatgtacaattgggttttacaccgagacattcagttctgaggggcaagcaggagacagtggccttcctccatctcgactgcaagaggctttcctcttttactaatccacctcagcacagaccctttatgggtgttgggctgggggacagtcaggtccttctcatcccatgaggccatatttcagactatcacatggggagaaaccttggacaataccccgctttcaagggcagaggtccctgcggctttccacagtgtattgtgcccctggtttattgagactagagaatggcaatgacctttaccaagtatactgcttgtaaatattttgttaacaaggcacatcctgcacagccctaggtcccttaaaccttgatttcatacaacacatgtttttgtgagctccaagttgggtcaaagtggctgggtcaaagtggctggggcaaagctacaaattaacaacatctcagcaaagccattgttcaaagtacaggtctttttcaaaatggagtctcttatgtctttcctttctacatggacacagtgacagtctgatctctctttcctttccctacatatattcatggaccacagtcttcaaggagtccatttcctcactgtttttggtttgatttctctgaaattaggaaatgccccattgaggcacccaggattgtctttacttcccccagagcttccactcctgaggcaggagcttctcaaacaccccccaagactcaacacctaatttcaccctctgaaaccttcccatttcttaaatccaggcagggtcatggtccttagcccctcagatgctgtggagaccttctttccctttcatacattctctcaagattaaaagccacccctcctcagcacacaccccagagactcaccccaacatgcattgcaaatcaccctggaaacagtcataagaccacactcatttaataatattttatttatcaaaagacactctttctcaggtaagtgaagttctggagaggaaaagaggagtcctgatgtaaattgccctgcaggccttgctgagatcacaaggagattgttactgcagcttgtagcacaatagtaaatttcttctctggatggaagttcaacaatccagatcgtagtatattccttttcattatgctcagtccagcaaatgtgatgataacaaattccttttcatgatcatccattcagcagagaaaatgtttgtaaatgtgttttcatgaagatgtttaccataacatacaggatttaccattatcaatgcatccacaaactctgctgttgttttttatacataattttttccatcgagaagtgatagttgtacatattcatgctgttcatatttcaaccacaaactctgctggtttttttatacgtaattttttccattgagaagtgatacttgtacatatttgtgctgttcatatttcatgtttcatcatccttttacaataaataggttatattgtattttaagtttttctaactgtagtgcagaaattgtactgggtgtatacatagatatcaaaccaaatttacttgttctggctgataatgcatcatttatttcatagattatgtatttctttgacacatttcacgtacaactaattgcataaaaatgaattttcttttagtatagacatcagcatgtgcttaattcggaatttaattgttgagttaaacatcgtcattgccttttccgttgttattaattgctctggtgggaattttgttatctcatacataagacagtgtgccacaatatctcttaaaatttcaatggcaataaactttatatttaaaaacagggaatctatggaaaacacatttttttctaaaggattaaaatatttttttaaaataattttctaaaaagttaggcacggtagcaaacgtctagagtcccagctactcaggaggctgagacaggaggattgcttaagcctacgagttgggggctgcagtgaactgtgattgcaccactacattccagccagggcaatagaagttaaccctttttctaaaaaaaaaaaaaaaagaaagaaagaaagaaaaaaagcaacaacaccaaaacctcaccaacaaaatggtaaagaaaaaaaaaacagcaatacaatgtaagctatttgatccaaagaagtcaatgaaatttaaaacaaatgaaagggaaaaagtaatacttgagtcctgcaggactcagtccaagttctgctgtgcctccctcacggtgagccacccctttagaagtcacttgggtcataagttaacccgataggaagtgtcctggccaatgaactagggaggtggtaaatggcaccattttaaatttaaattcacggccttttcaacggatcagtagccatgttgggtaagagtgcaaatgtcagaggtgaaaagaggcagcaggaccctcccctagtgcttgggcaacagaaggtggaatcactaaggggacaagactttagcatgctcaagtacacaggacagaaaacatgctttttacaaaagctggtaaatatgaagagggaacattttcaagttcctgtaaccaagaactaccgcctgtaaccggtgaaagtgactttctatggcaaaagcgtttttgaaaaggtgaggaagttaaatatcttaatgttgggaggttcttctggtttatctggctagaccctaatggaatcccaagtgtccttatggagcggggagcagagagagagatttgagtccagacgaggaagaaggtgatgtgagtctgggtgcgggacagggggagaatgatgctatgtggggatctgggctggggaatgacttagctgcatgagcggagtgacttagactcctgaactagaagaaatctagggctcatcacctcagcagccctaaccatcaaccttatttttattacaggtcttccatcgacggactccctaaaaagccagcggcgtggaggggcgccctctattggacaaatagatcttgactactttcggccctcaaatagcctgactaggcaaataacaaataataataatttttttttaaatcatggaaaatattttaaaaaacaattaaaaagttataaatctataaaatctgcttctgtctgtgtgtctgtatatttagatgtctcatgtgtacataatgtttcactaccaaaatatatgatgaaaccctcattaatcggcttagaaaactaaacacctaaatattttctcagaaaatacaaaaactttaactcaaatcccttttaattcacctgactttaaaaatctttaaaaaataaagcatgctttaaaattattagtaaagtaaaattagaacatcttcagaatttagacatttggtttaaattatacaggtcaaatactgcccttagtaaatattttcaggtcataaacaactcctgtaatcttttaaataattgaattacatgtctgttttagagctttaagttctagctaaagcctggggacaaatgaagggcaccatgccccctctctgtgctggaaagagacattttctacagctctgacccttgcagtaggctttgcaactgctacctatcaaaattgcctacatcctaagtttattattaaaaggagttgcttggagttaacattataatgaatatatgtaactaaaactatttctcatacaaagtatatgaaaaagtagaatgtatttttaataaaaagttataaaaagacatgaacatgtagtttttataaaaaacagtaattttgtctagttttgcagttctaaaaagttatgttaaattcaaaaataaaaaataacaagacaagactcaaggtttaaataagttgtaaaagatttgtaaaaattagttctataaaaattttacaaaaaaaagcattggttaaaatttaaggaattattttgtttttacagaaattaaacattcattaaaaacactctgatacaaggccttaatttgggttcatgtatcagaatagcagggttttcttagaatattaatctattctttaaaagaactatgaatgttatgcaaactttataaaaatcttaccttagagtcaaactgattaaaattccatagattttacgtaaaattttattaaaaattaacttcaacaaaaataaaatttgattttctcctttaaacaaaagttttgcgtaatattaaataataaagcatttttgtttaccttttaaactataaacacacacacacatacacatacaccaacactaaagtcagctgacctcatactgtctttattggatattcttgtttaaaaaactatcttctttggaaaataaagttttttattttaaaccatattttaaattatcattttgactaaatccataacatacagtgatctgtaataattctattttataatatcaagtgttttgaagaactccaggaacagccatgagagaacactgtggtttagtaacactttatttcctcagtttgaaaatagttgtctttcttggggaggccggtttcagcagatgaaaacaagagtcatgatgaaaattacccagcagtggttagtgtgaccataggaacattgtcatcaggtcagcagaaaacatatcagcaaatttttctcatactggcagtgtgtaggggtggatgtttacagttcctgaagccccagtggtcgtgtggtcttttagttttgccatttataggcaacttgtggtaactagctcaattagacacattccttatcacaaggacagagggctttctgtatcctagggttcttgccttggcattccagaagaatcaggtcacacgtggacgtggagaatgagtgcaaggttttattgagtggaagtagctctcagcagatgggggagccagaaaggagattggtttctccctggattggggccgttcagcagccctggctctcctctgactgccccaggcaaaatccacatcgttctataagtcggtgccctgctggtgtgctggtgcctgttgtcatgttcctcttcatgtccagccgcctgtgtgttcctccgctgatgtgctcctctcgacgtcaagcctcctgtgtgtctgactgctagggtcttggggtttttataagcacaggatgggtcttagcaggccaggatgatcttgggaaagacaacattcggtcaggaaaacaaaaatgcctgttgtcatctaggtccgtggggacaagcccaggtgtggagcttttagccagggaccacagcctcctgtatccaacacttcccttcaccttttctatatcattcaaagggatcatgcccttcccatcccagcacttcactttcatgtcatttgccccctctgaagaggtacatctaactgccattagaatatggatgatgaccagtcttagctgcttcctgctgaaagggggcattgttttgggggaaaacggcagtcagattcctcccaggggtctctataataaaagatcgaggtggctactttcaggaggtcctctaatgtactatctggtcccaagtcccatttctgcaacctcctcctgatgtcaggagctgcctgagtaataattttatcctttaggattatctgtccctcgattgaattaggagatagagaggtgtgatttaccaaggcctctcttagcctctccaggaaggcagtgggattttcatcaaatccctggttaattatggacaacttagtataattgagaggcttggtcttagacctacgtaagccctctattatgcacacctgaaagtgtctcctcttccagtcttccatctcattattgggatcccatttagggtccttcactggtgctacttctcttccagttggataatattcgctcccttccctgatgctataggtgatgcaaagctcatccccaaatctctctgctgctggcagagcagcctgcttctcagtgtctatcaggttctgactcaaaagtaacataacgtctctccaggagagttcaaatgttagggtgaaattctggaaagcttctatatatctatcagggtcatctgaacacttgcccagatctcccttaatttgctttaagtcttgtagggaaaagaggacttggaccttactgggcccaaattcactgggcatctgtaggaggggcaagagtgagactgggcttgtttgggatgaagatttctaggaggggccaggtgagaggctgaagctggatacggaggttggggtggacccagaggagcagggcttgagggagctggcacgtcagctgggggtgcgtctgggactcgtgtctttaattccctgggcttgaccctggcagccttccccgagacagcaaacaggagggctggaacaatcctacatgtcagcaaaggtctggattgctttgcaaggtatagaaagcctgcacatttggggcctcagaccatgtgtcctcacatccagagaaaagttctaattgcaggatggtattgaaatgaatggtcccttcctgaagccaagccagtccttcctgtaaaccataatttggccaaacctatgtgcggagggctatgagatgcttttcctctggattctgagggtcaaaacagtcccaatggttcaggatacactcaaggggagtacaagctgggggtggtgaggagaactggctgcccattctgaaagacagggaatagaggtgttcctcatttcccttccttcttttggcaaaaagctcagggtgtgatggggagggaaagcaagcatcttcacttcactttccacctcttacccctgcgccctggcaaccttggcaggtgccggccacaggtacaaatgcggtatgtacccatgaagcagggagaacctggagattaggaattaactgccctcacctatgtttccttttctccctgctgttgaaaaactttgagttccctgggcctttttatcccatgaggcatggcctccttctgtgggatggggttcagtcagcaggaattggtcctgtccatttacattgtgcctgttgcctggctttgaattcctcagacctgctttctctttctagggcctcagcctgaagcttggaattgagtttgggactgaaaaagcatttcagaggctgtttatatccatttagtgcctcaaataagccctgctgaatttgcaattatcagccagcaggggtcactcctctgttaacttccctattagaaacagagcggtggggattctcacttagaaaagaaaaaaagagaaaaacagttaaagaggcaaaaagtggggaatgctgggggaagaaccccttgcttagtgcaagtgggcccctctaatccttataactttcccatccttcccccagttcagaccaggttgaattccttggccatggaaggaaaggttccattgatgcagtgggtgagaagcactctgtagggtcctggctaccatcggttttctcacacccccctcatcccaggcagtggagggagacacttctgcgacattgctccccctgccccttcatggctattgggtgtggcctttgcctgctgcaggcatgcctaggtgctggagctgggagggaaaagggtaaggagaggtgccctggaagccgctcatgcctggggctgtcaaggtggaggcatacatggcacctctaggaaaaattggtctgatttgcacctttggcggctgagccaaatgctcattttacttagtaacattgcctcagcctgtagcaaaactcttaacattataaaggaagagataagatccatttcaaataatgtgtgagagagaaaagagatgaaaggaaaacagagtcttttacctgcaggaaagggagagaagtggcagagttttggaagaaaggcaggcccaacagtttcccattcactcacactcaccttccgagatcccagacgagccaccagttgaaatgggaaaagtttccttgtccccctcacaggaggtggagtgggggtgtggcttgcttctttagtactccgctgctcaaacctctagggaagcatacagactggcaagttgtggggctacaaccccatggcagcatctaggggtagatgtttacagctgctgaagccccagtggacatgtggtaccatgtgctcttttagttttgccatctataggtggctttgtggtaaccagctcaattagacccattccttaacccaaagacagagggctttctgtatcccgcggttgttacctaggtgtaccagaaaaatcaaatcacacgtggtcttggagaatgagtgcaaggttttattgagtggaagtagctctcagcagatgggggagccaaaagggagaatagttttcccctgaagtcgggttattcagcggcccaggctctcctctggctgccccagccaaactctatgtcaatccattggtcggtggcctgccagagtgctggtgcctgttggtggattcctctcagcgtcgagagtttttccctctcaggaaagggagagaagtggcagccacccatgtgttcttgcactgatgtgctcctctcgacgtccaacctcctgtgtgtctgcctgctagggtcccagagtttttttaggcacaggatagggcatggtgggccagggtgatcttgggaaatgcaacatttggtcaggaaaacaaaaatgcctgtcctcatctaggtccaggggcacaagcccaggtttggagccctagccagggaccccggcctcctctacccatcactttccttcaccttttctgtatcattcaaagggaccatgcccttcccttcccagcacttctcttctgtatcaataggtgatgtttttaaaatttcccaactctagtgcaggcatggtactagacatatacatagaaataaaaccacacttattcttctggctggcaagacatagtatttttgccaaattatgtgttgttttgaagcattttatgtacccctggtcatataaaaataaagctattttgttcagtacaaacagcagcattttctggattagaaagttaatcatcttaaaagatcatcacggatttttccattgcactcatcactaattgctttggcaaaaaatttcttatctcacgcatgacaaaatcagccgcagtatctcctagtaatttaatggtgatgatctttataaaggaaataagcacatcaagggaaaacataattttttttaaaaaaagagtaataaaactttttaaaagtcttttttaaaagactgcttttctaaaatagtaaaataaaactccaccaataaaaccaccaacaaaacagaaaagaaaaaataatgatatgatcggagctatttgatgaaagatggtaaattaaatttaaaatgattagaagagaaaaagcaatacctgtctcccgtaggtctcagtccaggttctgctatgcctttctcctggtgagccacctatttaagagtcgcttaaagcatatgttaatccaacaacagcagattaaaaaccaatgcaatctgaactatttgatctaaaaacataaataaaatttaaaacaaataaaagagaaaaagcagtacctgtgtcctgtaggtctcagtccaagatctgctctgactcccttgtggtgagttagccctttagaagtcacttggggtggggcatatgttaattccactaacattggttctggccaatgagtcaggaaggtggtaaatggcaccttttcttcttgctgatttctttcagttcctttggagtctggacattagtcctttgtcagatgcctagtttgtgactactgtttcctatactgtgggttgtgtgtttaccctgctgatatttcttctgccttgcagaagattttcggtttcattaggtcctattgatcttattctatttttatatttttgcgtttgcttttggggcattagtcatgactacttggcctaagccaatgtctagaaaagctttttggatgctatcttgtagcatttttagactttcaggtcttagatggaagtttttatatgctttgttaaagatcaggtgactgaaagtaccgggctttgtttctcggttctctattctgttccattgctctatgtgcctatttttatacttcctgcaccatttattgaataaagtgtcctttccccaattagtgtttttgcatactttgttgaagattagttgtctgtaagcatttggctttatttctgggttctctattctgttccattgctctatgtgcctatttttatacttcctgcaccatttattgaataaagtatcctttccccaattaatgtttttgtgtactttgttgaagattagttgtctgtaagcatttggctttatttctgggttctctattctgttctattgctctatgtgcatattttataccagtatcatgctattttggtgattgtagccttgtagtataatttaaagcctgccttcagatttgttctttttgcaaagtattgctttggatatgcggtcacgtttttggttttgtataaattttaggattcttttttctagttctgggaaggagaatgatgatattttgatgagaattctactgctctgtagatggctttggagagtatggtcactttcacaatattgattctacctattcataagcttataatgtgttcccatttgtttgtgtcaactgtgatttctttcagcactattttgtagttttccttgtaggaaacttacattaacctacttggttaagtatatttctaagtattttacttattaaaaattctcagggaaatgcaaagtaaaactgaggtgggaaattaaagaaaaataaaattaaaaagaaagggaaataagctttcttgtattaagctaacttgtcccagaggcagcaacaggcacagcccagacccaggaaaagtcttgataatattatttattgtattctggagactcttccagcactccttcaatgtagggagaagaaaaacaaattttcctttgttttatggtatgagtttatagattcttgttctctttaactagtaacttcaagtattctgttttatctaagaagtatggcaaaggtcatgagaagcctgagcaggcctgaactacagctctctaggcaccatagtgaagataaaccaatgcaagcctctttagagcaaaacctagataatagacatctgggttgcatagcaacagttatgtgcaatcctgagttatgaacctgttacaatttgattaactgtctttttcctgcctctgtatccctgctttcacaccactgtaagcttgcttcaagctggcccacccccttttgtgaagtgtgtataaaagtcaagtgctgtctttgttccaggccctgtctttggacgtgagtctgctgggcctgagagcactcaataaaagattctcctgttttaacccaaagcctctctctcatcctcctaaatcccacaacaaaaccacaatgagatgctatcttaatcttgctagaagcccataatttaaaagtcagaaaacaatagatgttggcatagatgtggtcaaaagggagcactttgacactgctagtgggaatttaaactagtccgaccactatggtaaacagtatggggattccttaaagaactaaaagtagaccattcattccagcaatcccattactggctatctacccaaaggaaaagaagttattccataaaaaagacacaagaatatggatgtttatagcagccgattcgcaattgcagtgatatgggaccaacttaagtgcccatcaacgaacgagtggataaagcaaatgtggtacaccatggaataatacttgataataaaaaggaacaaaataatgtcctttgcaacaagttggatggaactggaagccattattctaagtgaagtaactgaggaatggcaaatcaaatattgaatgttttcacttttaaatgagagttaagctatgagaatgcaaaggcataagaatgatataatggacttggggactcagggggaaaggttgggagggggatgaggaataaatgatgacatattgggtatattatacactgctcaggagacagatgcctcaaaatctcagaaattaccactaaggaacttttatccacataaccaaaaaccacatatattccacacactattgaaagaaacataaacattattttaaaaaataaagccacttttaaaattagcaaaataaaataaatatgtcttcagagtttagatattggatccaaattagacagatcaaatactgcctttactaaatattttcatgtcattaacaacttctaaaacctttcaaacagttttttgacatgtcttggaaccatccatttctagctaaggcctgggcacctgtgaaatagggccatgcccccccttatactgggaagagtaagatatttcaagactaagatgttttctacagctccatctttttctttaagctctacatcaaggacataattaaaattggttgtctcctaagtggtttactaaaaatgcatacttaagagttaccattataattaatatttgtatctaaagctacttaaaaattttcacacacaaatctgactgaacaagtaaaatatattttaagtcaaagtttataaaaggacatgagaacatagcttttatgaaaaaattagttttgtcaagtttagaggttttcaaatattttaaattcaggaaataaaataacaaaaagacaaaagaaaatggttgaacaacttagaaaaggtttgttaaaattcatcttataaaacaatctacatgtaaaaagtgggctaaaatttgaaagagattatttaggttttccataaattaatccagaaggggtaggaagtcttaagaatgaggaaggacaggaggaaggggaggtcatcctgacactgcagaggcagaagtgcagctgaaggtatgaaggctaagaggggaggggagtttgagtgctgctgcctggctgtcagagcagaggagggtcctgggcaccagacttgaggaagggatgaaaatgctgggcagacctgtagtgggcccttgagatggcagatagtggtttccagagagagggccattgttttccagtgcccagcactgagcagagagagttttgggcagtgtaaaaaaaaaaagagaacttacctctttctcgttttagaaaaagaacagtctaagaatatcagcagggaaactctcagtgcttcaaggggttaaacgcccttttggctttcttgtgttggtttcatcatagaggaggagaaacttcttggaagtgttcctaaaaacacaacacgtctgcttctcctttcaaaaaaggaagtgctaaaacacgaacactctagatccaaatattaatacggatgtctaaatgcttccgttttccaaggggcagaaagctaaaggttgtaacctattcatttcagtcaaagttggtgaaagggaagcaaaggaactgggtggggcttggaaggatgacgaagctcaagctcattggccagcaacctctctcctgggggcgggaggggtgagcatacgtcattgctttggcttctataaaatgaggaggactcaccgagtgtgaagagtccttctggtgattgcagctgagagcacactcacgacgttctgcaaggattctctgattatgattctgaagggaaaagcgatggaatggacagcagagattgtaattttctttatcttgaattacggaagaaagtatctaggacagaaatccacgacaagtccttggaaccagcagatctcttcgttcacggagacgttgacgtattctctattgaagaagattcttaccttcttactggacaaggttttgtcagttctgcgtgactggattgtccgggagactctgaggaaactgatgtcacatgtttttccaaagaagatgtttctggaaccaacaactgtgattgtggtttgaggacttctgagagttccagtacaggaaataagcagaacatcagctggaggctaaacggatccagacttcactcttcacttcccttcctattcagtctattgtgcctgctgactgagaagcttggctggtatgtgagcaaataaacggaactattcagaaggagatgttgacatattctgtattgaagaagatccttatcttctcacctgacaaggttttgtcagttctgtgtgactggattgtccggaagactctgaggaaactgatgtcacatgtttttccaaagaagatgtttctggaaccaacaactgtgattgtggtttgaggacgcctgggagttccggtatgcgaaataagcagaacatcagctggcggctgaagggatgcagcctccactcttcacttcccttgccattccatctattgtgtctgcctgactgagaagcttggctggtatgtgaggaaataaacggaattataaacaaggagattgtttctcatctacttcattctgttgtggcttttctattttggggttcagggtgtgtgacaaggaccaaggagatgaaaggtttcatgatggagaaagcccaggcaatcagattgaagagctatccacagggaatcttggctgctgaggggctgcaccctgcaacggactgaccatatgacagaaaagggttttaaaggctcaacttctggactgagaacccagagtaatttgggaacctcctctgtgaggagatatgaaagctgggaatcatgacatccctaggaatggaaggcacatttcctgatggaaggggtgctttggaaaacaggagcagagtagacacagcagccttgtggatacgggtgggcagcatgcatgggtgatgtgaacgtggagtgtttgtgatcgaaactcaaaatgtctgacaaagtgaaaacctagaaaccacaatgaggaggaagagtttgtgagggcaatcactctccccatgtgtgaaaatcgggggctcttaaaatctcatctggagaggtgcagtctaccaaactctgggactttagcctccccttttaaaaaaccgtgcatcaataccaacgtccgaaaccacagaaataacacctggcttgcatggagacaaggacaaaaagccgtcatgatgagttgttctgctcacttgctgcctctgttcagtgcacaggatattgtccacccactagcaggctactgcaagagaagtgtgcaatatgttccctatgtgccatatatgtgccatatggcccatatgacaactgagtcagaaaatatctgatgccctcagagttacactccacctggagcttgcccccagccatccaggacctaggctccctaccctgtccaattttctggtgttttgggggcttcattctctaaggtgtgcccactctttactcaaaccaaaacacccacatattcctgcccatgaacaaccaatcaaccacttctcagttccacatcctgctgttgggtctctagtggtgacactgtaactcccaggtcatagtggtgacactataacacctagctaaattgatgccttgtctctaggaggccatgggctcctgcaggtctcatctgactctctgtagccttccctgacaatgctcacaatacccaagccagagccacattgacagcaagctgctctcatcttacctttgccagacctggccactggaaaaggctgaccctcatcctgcaatgcctatacctccaacctttgtctcaagctggtgtcctggagggacttctaagcagaaaacagattcagactcccatcctctcctgaatggcctcatatccaattctcagaccctcagccttcattgtaaggacacttcatccatgcccttgagtattctgtctgcactgtgtattctgcaatagattctcctccctctgcgaccctcaactccttccgcagactttttgttttcttgatcatctaccatagtcttccactgggacactgccaagcccattctggagagtgagttgtgcaagtacactgccccccatctacctttcgggaggtgtatacacccttctttctcccaggtctggaggctttctattttcatcctgaggcatctccacctgctcttggattcttcaaattgacaaccaccagttaacaagaactatgtgtcaccaaatagccaaacaatggcaattacaaaaataaaattaatagctgtaacccccattagcaaggatacacaaatcaaatcagggatagtgggtgaggaagtctgcctaacattcaaggaaggattctgaagtgatacaaaatcattgcctttgctatctttagaatggacactttcagccaggcacagttgctcagcctgtaatcccagcactctgagagccccagttgggtggatcacttgaggccagcagcttgagaccaccctgggcaatgtgcagaaaccccaactctactaaaaatacaaaaatagccagttattgtggcacatgcctgtaatcccaactccttgggaggctgaggcacaagaatcacttgaatctgggagccagagtttgtaatgagcgaagatcatgccactgcactctagcctaggcattagagtgataatctgtctgtggaaaataaaaacattcctcttcaaagttttcttctttaaatcataaatgttggaattaatatatcctctttgaaactcactttcttcaagcttctttatttgatggtagtaaatctttgttaagctttatgaggcaagagtaatggaagaagcatattatatatatttatactctaacctcagtgcttgttctagcaagctcaggcatgcgtgaatgtgcccaggcatgttccagcccataccttatatcctttccttattgggaaatgctgttactcctataagcattcttgtaagcaacttcctctttttctttgtctccactatctttacctattgaggacagttttaggttcttagccagttggatgtagcatagactgtgaggtccaaccccagccaatggagatagcacacagcagtagcgacctcatgcttaacagataaatattcctgtctccctttgtttggggtgctctcagctgatgagcaacaccctttctaaagaaattaaagttgtcttgctgagaaaacttttggtctaaatgctgattcttccttgcagcactgaagaagaagcaattatttccaacactttctcatacacaaaaaaagaagaaggtggaagaaaactttcttgtgcaccctatccctcactcagaaagacaacagaaggctcctagtggcaagccctagaggattcatttcttttgggaaccctcttggctgggatactaggactcaggtcaaactcagcattttcagtgtgtgggaagtgtgcttgggtttcactgttacttccaataatgtgatttggtccttggggttcaccaaattttggtatggagtggtgaaccctgttaagtttaagtgtctataaaattaacaaagcaaaataaccattctgccccatggttcagagaccaaatattgtgtaggaaatgctttagcgagagaaacagagaagaataaaaaatgtcctcaagcgctgcattatttcttgttatcgtccagatcttagaggaaaggctttcattttccctcattcagtatgatattagctgtgcatctgtcatttatggcttttattatgttggggtatgttccctgtgtatgtagttttttcagggtttttgttatgaagtgatgttgaactttatcaaacgtttttcagtttcagttgaaacgatcatatgctttttgtccttcattctcttgatatgatgcatcatgttgatgatttccatatggtgcactgtccttgcatcctgggcatgaattccacttgatcatgacaaatgaatttttaatgcattcttgaattccgtttgctggtattttgttgaggatttttgcatcaatattcatcagagatattggcctgcagtttctttttttttcttttttctttgttttgttgtttgtttgtttgtttgttttgatgtgtctatgtctggttttggtatctgggtagtagtgttccatccccttttattttttagaataatttgaataagactggtgttggttctttaaatatttggtagaattccgaagtgaagtcattgggccccgggcttttctttagtggaaggctgtttattatggcttcaatctcgttacttattattggtctattcatgttttgaatttgttccttatttaatcttggtaggctgtgtgtatctaggaatttgtccatttcttttagattttcaaatttattggcacataattgcccattgtagcctctaatcgtcatttgagttcctgcagtaccaattataatgtctccttcttcatttttgattgtatttatttggatcctgcccctttttttcttacttaggctgcctaataatttcttaattttgttgaactttttcttttgtttgtctcgctctgccaccaggctggagtgtagtggtgtgatcttggctcactggaacctccgtctcccaggttcaagcaattctcctgcctcaccctcccaaatagctgggactacaggcaagtgccaccactcccagctaatttttgtatttttagtagacacgggttttcaccatgttggccaggatggtctcgatctcttgacttcataatccacctgcctcagcctcccaaagtgctgggattacaggcatgagccactgcgcccagcctaattttgtttaaattttcaagaaatcaacttcttctttcattgatttctgtattttttatttccattttatttatttaaactctaagctttattctatcttcttctcattttagctttggtatgcttattgcctctctagctctttaatgtgcattgttagattgtttatttgaagttcttcctctctacaccataagacgtaagcatgtcctcattatgtcataagatgtaaccacttacagctataaacttccttcttagttctgcttttgctgtatctcataggctttgttatgttgtgtttccattatcaattgtgtcagaaatttttcaatatttttcttaatttcttcattgagcaactgatcatttgggagcatatttttaaacttccatgtacttacatagtttccaaaatacctcttgtgatcaatttctagttttattccactatggttcaagaagatgcttgatattatttcaattttttttcacattttaagatgtgttttgtgacctaacatatggtctactttttttttttattaaactttaagttgtggggtacatgtgtagaccgtgcagttttgttacataggtatacacgtgccatggtggtttgctgctcccattaacctgtcatctacattaggtacttctcataatgctatccctcccctaacctccaccctctgacaggacctggtgtgtgatgttcccctccctgtgtccatgtgatctatttttgagaatgatccatgtggattagaatgctgtggaaaagactttggattcctaatatccagggagggagacgatgatattactttcaatatcacacgggtgtacacactctctgtgacattgttcctaatatccagtggaagagaggatgatataacacccagggagggagaggatgatattactcttaatattgcagggtgtgtacccatgcctatgatattgttcctaatatcaggagggggagaggatgatattactcagaatatggcagggggtgtacacacactctgtgacatggttcttaatatacaggggagaatgggacaatattactctcaatatcgcagggggcgtacaaccctgtgatttgttcctaatatacaaaaggggacagtatgatattgttcctaaaatcgcagaaggtgtacaacgccctgtgatattgttcctaatatccagggcgggagaggatgatattacccccaatatcacagggggtgtgcactttccctgttacattgttcctatgatccgagtggggggaaatgacattagtcccaatatcgcaggatgtgtacactactcccccatgatattgttcctaatatcaagggggagagaggaggatattactcccaatatcgcaagggaggtacatcctccatgcaatattgttcgtaatattcaggaggagagaggaagatattactctcaatatcgcagaaagtggacacccaccctgtgatgttcttcataatatccagggaagcagacgattatatgactttcaatatcgctgggagtgtacatcccttttgggatattgtttctaatatccaggaagggagaggattatattacttccagtattgcagccagtgtacacatttcttgtgatattgttcctaatatccagaaagggaaaggatgatattactcccaatattgcaggtggtgtacacccccctctgatattgttccttacatcaaggaaaagaaagaagaatattactcccaatatcgaagagagtgtacacccctcctgtgatattgtatttaatatccatggggaaagaggatgttgttactcccaatatcgcagggggtttacacccacactgtgatattgttcctaaaatccagtgaaggagaaaataatattgctcccaatattgcagggtgtatacaggccctcccccgttatattgctcctaatatccagcggtggagaggatattactttcaatttttgcagggagtgtgtaccccctctctgatatttttctaatatcaaggatgggaaaggatgccattactcccaatatcgcaggaggtgtacatgccctgtgatattgttcctaatatccagggaggtagaggatgatattactttcaatattgcaggggctgtacaccctctatgatgttgttattaatatttaggttgggagaaaatgatatttttcctaatatcctgggaaggaaaggatgatattactgtaaatattccagggagtgtacaccttcctaatattctaatattgttcctaatatccaggggtgggagaggattatattactcccaatatcgcagtgggtgtacacccctcctgtgatgttgtttctaatatccaagcgaggagaaaatgatatcactctcaataccgcagggggtgtacaccttccccatcatatcgttcctaatattcagagggaaagaagatgatgttactttcaatatcgcaggggttgtacacaacccctgtgatatttctcctaatatccaggaagaaagaggatgatattgctcccattatagcagacggtatacgcctccctgtaacattgtttctaatatcaagactgggagaggatgatatcacttccagtatcgcaaggggtgtacacctcccccgtgatattgttactaatatccagggggaagaggataatattactttcaatattgcaggggctgtacacccccgtgatattgttgttaatatttaggttgggagaaaatgatattagtccaaatatcgcagagagtgtacacacttccgataatattgttcttaatatccatgggggagacgatgatattacacccaatatcgcagggggtgtagtctccccttgtgatattgtccctaatattcagggaagtaaacgatgatgttagtgtgaatattccagggagtgtacaccccctttgtgatattgtcctaatatccgcaggagagaagataatattactcccaatatcgcagggggtgaacacaccccctgtgatattgtttctaatatccaagcgaggagaaaataatattactcccaatgtctcaggggatatacaccttccctatgatattgtttctaatattcaggtggaaaacgggtgatattactcctaatatccaggaagaaaggggattatgttactccccttatagcagggggtatacacctcccctgtaatattgttcctaatatcaaggctgggatatacgtggggggaaggatgatattactcccaatatcacaggggttataaaaccttctgtgatattgctcctaataaccatggcggaagaagatgatattactcctaatattgcaggaggtgtacactcccccattatgttgttcctagtatgcagaaaaggagaggatgacattattgccaatatcgcagggtgtgtacaccacccatgatattgttcctaatatttagagggacagaggatgatattactcccaatatcgcagggggtgtacacgcatcccctgtgatattgttcttgaaatcgaggggaaagagaattatatttctctaaatattgcagagggtgtacaccgccccctgtgatattgttcctaatagccgggggcggggggagataattaaattactttcaatatctcagagagtgtacatcccccttgtgacattgttcctaatatccagagcaaaagagaatgatattcctcccagtatcgcaggaagtgtacatttaacctgtaatattgtttctaatatccagggggaagagaatagtaatactcccaatatcgtaggggttgtacaccttttctgtgatattgttgcaaatatttagaagagagagagaatattactcgcaatatcacagggaatgtatacttcccctgtgatattgttctaatatctagaaaaagagaggataatattactcctaatattgcagggggtgtacacccccacttgtgatattgttcctaatataaaggaaggtcgaaaaacaaacggggagcccagggggaaggaaggcaggcgaggaagaggcagcgccggggcgccggagggagcagccgggccgcggaagcgcgagcacgagaccggtcgcggtcgcagtcgcatttttgccgttgtcgcggccgccgccgccgaggcttacccggggatgtctgagcccgcgcctcgcggcccccaagctccacgctgcgcccgctgtcccggcctctaagggccgccacgtccctgcggcgcgcgcaggcagaaagcggcttcgtgccggcggagggggcccgggcgggccgggaaaggctgccccaggccccgcgcctaccccatcaccgcggccggcgccgggccgggaggatgagcggtgtggggctctgaagcatggagggggttttgtacaagtggaccaactatctcacaggttggcagcctcgttggtttgttttagataatggaatcttatcctattatgattcacaagatgatgtttgcaaagggagcaaaggaagcataaagatggcagtttgtgaaattaaaggtgacagctttggaggggaccacccttgattggatacataaattctgttcattcagcagacaacacaagaatggaattaatcattcctggagagcagcatttctacatgaaggcagtgaacgcagctgaaagacagaggtggctggtcgctctggggagctccaaagcatgtttgactgatacaaggactaaaaacgaaaaagaaagaagtgaaaccagtgaatcgctgaaaaccaaaatgtctgaacttcgcctctactgtgacctcttaatgcagcaagttcatacgatacaggaatttgttcaccacgatgagaatcattcatctcctagtgcagagaacatcaatgaagcctcttctctgcttagtgccacgtgtaacacgttcatcacaacgcttgaggaatgtgtgaagatagccaatgccaggtttaaacctgagatgtttcaacggcaccatccggatcccttagtttctcctgtgtcaccttctcctgttcaaatgaggaagcgttctgtcagccaccctggttcttgcaccagggaggagtagccactgtataaaagaaccagtatctgcacttcaccgactctcccagcgacgccgaagaacctactcagatacagattcttgtagtgatattcctcttgaagacccagatagacctgttcactgttcaaaaaatacacttaatggagatttggcatcagcaaccattcctgaagaaagcagacttatggccaaaaaacaatctgaatcagaagatactcttccatccttctcttcctgaagaaactgtagtgtccaactttctctaagtattgctatgcaaaagctgctgtaattgaactattgttatagggagtagttttttcccttaggactctgcactttatagaatattgtaaaacagacaaacaagaaaacaaaccacatacttttgaagcgtgttttatctttatatagtttgtttgcaagagtattttcctaataacttcacagtatgaatgtgcatcttttttttctttttttaacaaatgatggtgtaacattttgacatccataaggacaaatgtagatatttttctaaaaaaccgtgaggggactgacagcttggtcagggtgtattgtagcttataaacatgaaatcttacaaggtttcagtttgacagaagtgtgatatatgtaacttgtgccatggaccaaatggtcactttaccacagctaaaaatgagttatgatagcagcttgatggtgattgcattgtattcctttaatcaaaaaggaaacgcaatattctaagtatctttagcccaaataccatgacatattgagcatctttaaataaccagactgtattgtccttcatatgtgaagttgacactactgatttgtcaataccaaattttgggttaaagtgtttaatttttatttatttattttcttgttgcctcaaaagatgattgcattctaacttttgtgacctaccaaatttaagatgtgtatacattgttctttacgttgttctagaaaagagattttaatgctgtagtgacttagctcacttacatcagagaaataaacaactttcaatggaaaaaaatatatataaaggaaggaagaggatgatattacttctcatatagaaggggttgtacaccccccttgtgatattgttcctaatattcagggagggagaggattatattactcccaatatagcagggagtgtacacccccccccccgtgataatgttcctaatattcagggaagcagaggatgatattactttcaatatcacagggggtgtgctgtccccctgttatattgttcttaatattcaggggggagaggatattattatgcccgatatcacaggagaagtacaccccacaagtgatattgttcctaatatccaggggtaaagaggatgatatcgcaggtggtgtacacccctccccgtgatattgtttctaatataaagaaggagagagcatgatattactcccaatatcgctggaggtctacaccccccttgtgatactgttcctaatatccaggaagggaaacaatgatattgctgtgaatattccagggggtgtacacccctttgtaatattgttcctcatatccagggggtagagaggatgatattactcccaatatcgcagggggtgcacggccccactgtgatattgtttttcatatccaggaggggagaggatgacattactctcaatatggcagggggcgaacaccccctgtgatattgtgctagttaggttgggagaaaatgatattactcccaatatcgcagggggtgtacaccgctcctgtgatattgttcctaatatccatgacgggagaggatattactcccaatatcgcagggggtgtacctctcccctgtgggattgttcacagtatccaaaagggaagaggatgatgttactcccaatatcacagggagtgtacaccaccattgtgatattgttcctaatagccagggaagaaaacgatgatattattgtgaatattacagggggtgtacacaccccctgtgatatggtttttaatatacaggttggaaaaggatgatattactcccaatatcacaaaaggtgtacacacccccccatgatattgttcttaatacttcggtggggagaaaatgatattagtctccatatcacaggggtgtgaactcctccggtgatattgtttttaatatcaagaggggaggagatgatattgctttcaatatcgctgggggtgtacatccctcctgtgatattgttccttatatccaggcgaggggaaaataatattactcccaatagtacacaccccatgtggtattgttcctaatactcagggggaaagaagataatattactttcaatatcacagggtttgtacacctttcctgtggtatagttttcaatatccagggggaaggtacatgatattactcccattgcagcaaggggtgtacacacctcctgtgatattgttcctaatatccagaagtggtgaggatgatattactcccagggggtgtacaccccacctatgatattgtttctaatatccaggggaaaagagtgtgatattatgcccaatatcgcagagggtgtacacttatcctgggatattgtttctagtatttggggagggaggagaggatgctattattctcaatatcgcagaaattgtacacccccgctgtgatattcttcataataatcagggaaaaagaggatgatattactaccaatattgcagggggttacacttcccctttggtagtgttcctaatatccaggaagaaagaggatgatattaatcccattttccaggaagtgtacacccaccgtgtcatgttgttcctaatatccagcagggaagaggatgatattactcccaatatcggagagggtgtacacttcccctgttatattgtttctaatacccagggggaagaaggatgacattactgccaatatcacagggtgtgtaccccaccctgctattgttcctaatattcaaaaggaaagatgaaaatattactcccaatatctcagggtgtgtacacctctcctgtgatatcgttcctaatatccacaggaagagagaatattactctcaatattgcaggggggtgtacacccccctgtgatattgttccaaatattcgggcggggagaggatgatattagtcccaatatcgcagggggtgtgcaccaacctgtgatattgttcctaatatccatgcgggggaggacgatatcactctcaatgtcgcaggaagtgtacacctctcttgttatatttttcttaatatccaggagggaaaagatgatattactgccaatatcgcagggtgtgtccaccccccttttatattgttcctaatatccaatggaaaagaggatgacattgctctccatatcccagaaggtgtacaacgcccctgtaatattgttcctaatattttgggggaagagaggatgatataacttataatatcacaggaggtgtacaccacccctatgtattgttcctaatatcctttaagggagaggatgatattactcccaatatctcaggtggtgcctattccccctgtgatattgtttttaatatccaggggaagagagtatgatattacgcccaatatcgcagggggcatacaccctctctgagatattgttcataatatatagagggagagaggatgatattacttccaatatcagaggtggggtacaccccccggttatattattcttgatatccaggaggggagaggttgatattactggatatatagcagggagtgttcacatcttctgtgatactgttcctaatatccagaaaagtagaggatgatattactcccaatatcgcagaacgtgtacacctccctgtgatattgatcctaacattcaaaggggagaggatgatattactcaaaacatcacagggcatgtacactcccctgtgatattgttcctagtatccagaagggagcaagataatattactttcaatatcgcagggggtgtacacccctctttggtatgtttcctaatatccagaaggaaagagggtgctattactttccatattgcaaggggtgtacacccccctgtggtatggttcataatatccagggagggaaagggtgctattattccccatatcgcgaggcatgtacaccctgctgcggtacggttcctaatatccagggggaaagaggatgctattacttcccatatcgcggggtgtgtacacccccgtgtggtatgttttgtaatctccgggaacgaagagggtgttattacccctcatatcgctggaaatgtacactcccctgtggtacggttcacaatatccaggggattgagggtgctattactccccatatcgcggggggagtgcacctccctgtggtatggttcgaaatatccagggtaagagagggtgctattattccccattttgcaggaggcgtacacccctctatggtatgttttgtaatatcccaggtaaggggtgctattgagagaagagagcaaaagaccccccccatattgttctgtattattttatactcagtacctgttttaagaagaaacaaggaagcgaaaccaaaggcaggcagcccggcgccaggcaccagatccaaaaccagacccgaaaccaggcctgggccttcctgaccttagcctgaaagttaaaattcaacccatgacctagcaactgatgttatccatagattccagacattgtatggaaggacattgtgaaatttcttgttctgttctgtttcactctgagtactggtgcatgcagcccttgtcacatacccactagattgctcaatcaatcatggccctttcatgtaaaaaccttagtgttgtgagcccttaaaaaggacagaaattgtgcactcaacaagcttggattttgatactctagtctgctgatgcttccagctgattaaaagccacttccttcactacctcggtgtctgtgggattttgtccgcggctcctcctgctacactgtgactccccttatagagaggggtgtacacccccctttggttcctaatatccagcgggggagtaggtgctattactccccatattgcggggagtgtacacccccttgtagtacggatcgtaaaatcaaggagggagagaaggtgtaattatccccatatcacagggagtgtacacccctttgtggtatagtttgtaatatccacgacgggagagaatgctattactccccatatcgtggagggtgtacaccgccctgtagtatggttcgtaatatccggaaggggagaggttgctattactccccatatggtgggaagtgtacacccccatgtgatatggttcataatatccaggggggtagaggatgatattacccacaatatcatagaaggtgcacacccttttgtgatattgtccataaaatccagaaggggagaggatgatattacttccaatatcacagggggtgtgtagccccatatgatattgtttgtaatatcaaggtagggagaggatgctattccttacaatagctcaaggggtgtaaccttcttgtgatattgtttgtaatatccagaaggggagaagataatttttttattttaaaagtaaactttaatgtcaaaaatgcaaacttgagaagggcagaaagatcaaacagaaggctgccacttcacaattggagggttgcacagtggccgggcagaggcgctcctcactccccagacggtgaggcagccgggcagaggtgctcctcacttccgagatgttgcaggagccgggcagaggtgctcctcacttcccagaacagggggctgccgggcagaggtgctcctcactgcccagacggtttgcaggcctggcagaggcactcctcacttcccaaacggagcagcggcaagccagaggcgctccacacttcccagatggtggggcagccgggcagaggcgatcctcacttctcagagggtagggcggcccagcagaggcgctcctcacttcccacatggtggggcggcaggctagaggcgatcctcacttcccagacggtggtgtggccatgcagaggtgctcctcacttcccagatggtgtggccgccgagctgaggcactcctcacttccctgacagtggggcggctgggcagaggcgctcctcacttcccagacacttggactccgggcagagactctcctcatttcccagatggtggggctgccgggcagaggcgctcctcacttcccagacggttcagaggccgggcagaggcgctctggggagaggataatgttactcccaatatcgcagggggtgcacactccctgtgatattgttccgaatatccagagggggaaaggatgatatagctcccaaaatcgtggggagtgtacacccccctgtgatcttgtttgtaataccaagaagaaaagagaatgctattatttccaatatagcagggggagtacaaccccctgtgatattgttcgtaatatctagggggagagaaaattatattagtcttaatatctcaggggacgttcatccccctgtaatattgttggtaatattcagaatggagaagatgatattgttcttaaaatacaggaaaaaatatgataatattacttccaatatcgaagggggtgtacactctcctgtgatattgttcccaatatccagaatgaaagaggatgctattactcccaatatcccagggagtgtacacccctttgccatattgttcataatatccaggggaagacaggataacattactcccaatatcaccgggggtgtccacccactagtgatatttattgttcatcatatccagaaaaggagaggatgatattactcccaatattgcaggtggtgtacggtccctgtgatattctttgaaatatctagaaaaggagaggatgatatcactccgagtatcacagggggtgtacacccccctgtgatattgttcgtaatatccaggggagaaaaggatgatataattgccaatatttcaggggatgtgcacctccctgtgatattgtttgtaatatccaggggtggagaggatgatattactcaaaataacgtaaacatcctgtgtgtacatcccctgtgatattgtttataatatccaggggggtagaagatgacattacccccaatatcacagagtgtacacacccctgggatactgttcataatatccaggcgggaaagaatgaactacttccaatatcgcaggatatgtacacccccctgtgatatatttcctaatatttatgtgggtaaggatattacccccaatatcacagaaggtgtacatcctctttgtgatattattcctaacatccaggaaaggagagaatgatattactcccagtatcgcagggggtgtacaccacccctgtgatattgttgctaatatccagggggagaggataatattactcccaaaatcacaggggacgtacactcctcctgagatattgttcctaatattcatggggaaaagaatgctactactccaaatacagcagagggtgtacaccatccccgtgatattgttttttatatccaaagggtgaaaggctgatattactcccaatatcgcagggggtgtacaggccccccatgatatcattcttaatatccagggaggcaaagaatgatgttactcccaatattgcaggctgtatacaccccccgtgatattgttcctaatatccagagtaagagaggatgacattgctcccaatattgcaggggttgcacgcacgccctgtgataatattactcccaatatcaacagtgggtgtacactcctcctgtgatattgtttgttatatctaagaaagaagaggatgatattactgtcaatatcacagaaggtgtacagccccttgtgatgttgtttctaatatccagcggtgagaggatggtattactcgcaatattgtagggggtgtccaacggccctgtgatattgtttctcatattcaaaaaggaaaagaataatataactccaaatatcgcagggtgtgtacacttccctgtgatattgatcctaatatccaggaagagagaggatgatattaatcccaatatcacagggggtgtacatcgcttctgtgatattcttcctaatatccagggggggaggggatgctattactcttaaaatcgcagggaacttacactcccactatgatatttttcctaatatccaggaagggagaaaatgatattactcctaatatcacatatcacaatgggtgtacatctccccgtgatattgtttctaatatcaaggatgggagaaaattatattactctcaatatcgcagggggtgtgcacacctcctgtgatattgttcctagtatccagcggaggagatgatattactttaaatattgtagaaggtgtacaacccccctttgatattgttcctaatatccagggggaaaggagatgatattactcctaatatcgcaggggctgtacaaccctatgtgatattgtttcttctaatatccaggggtggagaagataatattactcctaaaatcgaaggggacatacactccccctgtgatatttttcctaatatccagaaggaaagaggatgatattactcctaatattacaagaaatgtatacctgtcctgtgatattgttcctaatatccagaggggtaaatgattatattactcccaatatcgcaggggtgtacaccttccctgagatattgtttctaatatgcagtggaggagaggatggtattactcccaacatcacaggagatgtaaactccccttgtgatattcttcctaatgttcaggacgaaggagggtaatattactcactgtattgcagcagggggtgtagagccccctgtgatattgtttttaatattcaaggttggagaaaataatattccttccaatatcgcatggggtgtacacccttctttttatatagtttctaatatctggggggagaggatgatattactcccaatatcgcagggggattacacccccactgtgatattgtttttaatatccagggtgggagaggataatattactccaaatatcccagggctatacaccctccgtgtgatattgtttctaatatccagaggaagagaagatgatattactcccaatgtcacagggtgtgtacaggccttctttgatattgttcttaatatccatgagggagaggatgatattactcccaatatcgcaaagactgtacaccctttctgtgatattgcttccaatatccagggagggagaggatattacactcaggatcacagggggtgtacaccccaacctgtgatattgtttctaatatctagggaaaatgagggtgatattactatcaatatcacaggaggtgtacactcccttatgatattgttcctaatatccaggagaatgacaggataatattactcccaatatcgcgggtggtgtctccccccactccgtgatattgttcctaatacccagagggggagagaatcatattactcccaatatcgcaggggatgtacacctacatccggcggagtagaagataatattactcacaatatcgcaagaagtgttcaccttccctgttatattgttgctaatatccagggagtgagaagatgatattactttcaatactgagcgtgtacactacccctgtgatattgtttctcatatccagtagaggagaaaatcatgttactcccaatattgcaggggtgaacacctcctttgtgatatttttcctaatatcaggaaagggagagtatgatattacccttaatattgacaggggtgtacacccccctttgatattgttccaatatccaggggggcagaggataatattattcccaatatcgcagagggtgtacaccccccgtgatattgttcctaatatccagagaaataaaaaatagtattatttccaatatcacagggcgtacattttccctgtaattttgttcctaatatctggggggtggggtggcaggataatattactctcaatattggagagggtgtacacccccctgtgatattgttcctaatattcagggtgggagagaatgatgttactcccaatatctcaggagtcgtatacacccccttgtgatattttttctaatatccaggaggcagaggatgatattgctcccaatatcgcagggggtatacacccgagctgtgatattgtttctaatatgcaatatgggggaaggatgattttactttcaatatcgcagggaatgtacactttccttgtgattttgttcctaatatccaggggtggagaagatgctattactatattactcctcatatcgcaggcggtgtacaactccctgtgatatggttcagaatatccagagtgaaaaaggagggtgacattactcccaatatcgggggggtgtacacccctttgtgatgtggttggtaatatccaggggggcagatgagggtgatatcactccccatatcgtggaaggcgtccacttttttgtgatgtggttctttatatcccgaggggagaaggtgatattactccccatatcgcgaagggcatacacccccctgtgatatagctcataatattccggagagtggaggaagatactatgccctatatcgcgggtggcctacaaccccctatggtttggcttataatatccaggggggagagggtaatattgctccccatattgtggagacgtacagccccctgtgatatggtttgtaatatctttggggggcgagggtgatattactccccatatcgcggggagcatacacccccgtgatctggttcatagtatctcaaaggaagaagttgatgtgtacaacttaagggaaaaagttgaagtgaagtgtacacacgccctgtgacgtggttcataatatccaggcgggggagaggagagtgatatttactccccatatcgcgggtgttgtaaactcccctgtgatatagttcataatatccaggggagagaggagggtgatattgctcctcatatcgcgaagggtgtacaaccccctgtgatatggttcataatatccagaagggtagaggacgatgatattactccacatatcttgggaggtgtgatatggttcgtaatatccagcgatgagagaatgatattactccccatatcgcaaaaggtgtgatagggtttgtaatatcctgagggggagagggtgatattaatccctatattgcagaaggactacaccctcccatgacatggtttgtaatatcccagggggtagagtgtgatattactttccatatcacagggggtgtgatatgattcgtaatattcgaagggggagagggtgacactactctccatatcacggggtgtgtgatatggttcttaatatcccaggggttagaggttgatattaccccctttttggggggtgtgtacaccccctgtgatatggttcgtaatatcccgggggagacagggtgacattattccccatatcgaggggatcgtacaccccctgtggtgtggttcataatatccctagggggagatggtgatattactccccatatcagggggcgtgcactcttctgtggtataattagtaatatccagggggcagaggtcgatattcgtttccatatcatgaagggagtacacttccctgtgatatggttcctaatatccaggggggagagggtgatattattccccatattgcggggggacatacaacccctgtgatatggttcataataaccagaaaagaagagggtgatattaatccccgtattgcagagggcatacaccccccctgtgatatggtttgtaatatctaggggaggaaaaggtgatattactttccatattgctgggtgcagacacccctttatgatatggttcataatatccaagttggagagggtgatattacttcccatatcatgggaggtatacccttccctgtgatatggttcgtaatatccagaaggggagagattgatattactccccatattgtggggggcgtacaccttcctgtgatacggtttgtaatatctaggggatatagtgggtgatattactcaccatatcacgggggttgtaacatggtttgtaatatccaggggaggagagggtaatgttactccccatatctcggggcatgtacaccctcctgtgacatggttcgtaatatccaggtcgggagagggtgatattactcctcatattgccgggggtgtgttatggttcataatatcctggggaaggaggctgctatcactctccacatcttgggggatgtacactctcctgtgatatggttcataatatccagggtgggtgagggtaatattactccccatatcgcgggaagtgtacatacccctgtaatattgtttgtaatagaagagagggtgatattactccccacatcgcgggtggtgcccacccccctgtgatatggtttggaatatccagggggatgaggagggtgatattactccccatatctcggtgggagtacatccctctttgatcaagttcataatatccaaaaggaaacaggagagtgatattactccccatatcgccgggggtgtacacgggagggggagtacacccccggcgatatggtctgtaatatccagggaaggagaggagggtgatattactcaccatatcgcaggtggtctacatttacctgtgaaacagtttgtaatatccagggggggaaatgagaatgattttttttttttgagtctcactgtgtcacccaggttggagtgcagtggcacgatcttggctcactgcaacccccgcctcctggactcaagcaattctcctctcccagcctcctgaatagctgggactacaggcgcaccccacaacgtctggctaatttttgtatttttattagagacggggtttcaccatattggccaggctgatctcgaactcctgaccctgtgatccatccgcctcggcctccaaaagtgctgagattacagatgtgagccaccacgcatggcccaaggagaacgatattactccccatatcccagggggtgtatatccccctgtgatatggttcagaatatccggaaggaaagacagggatattacttcccatatcgcaaggggtgtgacatggttcgtaatatcccatgggggagagggtaatattactcttcgtattgtgaagggcatacactcccctgtgatacagttcataatattccggggagtagaggaagatattatgctccatatcgcgggtggcataagccccctgtggtttggttcataatatccagggaggagagggtaatattactccccatattgtggggacgtacaccctcctgtgatatggtttgtaatatcccagaggggagagagtgatattactccccatattgcagggacatacacccccctgtgatatggttcaaaatgtcttttttttttgaaggactggttctttatttcaaaaagacacttgtcaatattcattatcaaaacagttgcactattgatttctctttctcccaatcggccccaagtagaccacatcaaaggagagtacatattaagccaataagctgtaggatgtacacctaacagacctcctagaaaccttaccagaaaatggggacagggtagggaaagaaactttaaaagatcaacaaactgccagcccacggactgcaggggctgtcacagccagatggggtggccagggtgccacaaacccaaagaagcaaagtttcaaaataatataaaatttaaaaagttttgtacataagctattcaagatttctccagcactgactgatacaaagcacaatgagatggcacttgtagagacagcagcttcaaactcagaaaagggtaatgagatgagtttcacatggctaaatcagtggcaaaaacacaatcttctttctttctttctttctttcaaggaggcaagaaaagcaattaagtgctcacctcaacataaggggaacatgatccattctgtaagcagttgggagggggtagagatggaacaaaattttggtctcagaggtcttgccatcttaatttggtcacttctaatgaaaaaaataaaaaatagaaataacattatccaaaggtatcttaaagctgaaaacttgaacagcacattttttgttgttgttgtttggctaactcctcctggaaccacctttctggcttagctagtactttgtacagagcaatgaggcttcccatagtggagtctccctgggctctgtttggctctcagcaaggcaggcctataccttttcctctcctccatggagagaggaatatgcattaaggtgaaaaatcaccttccaaaagtgagaaagggattcgatcgctgcttcagggctgtggtattatatggaatgttttacaaaaggttgctacaaaacaacaaaagaggtaattacaaaatgtgtacatcacaacatactttttaaagacattatgcattgtgctcacattcccttaaatgttgtttccaaaggtgctcagcctctagcccagctggaatctccgggaagaggcggacagtttggtgaaaaagacacagggaaggagcgggcggcggaaggagggggcggcgaaaggagaaagcagccttccagttaaagatcagccctcaattaaaggtcagcttcgggcaggctggcctcaggcggagtctggttcagagggaggagcagcagcagggtgagactgaggcgttctacatctcattcaggtcaagcagagtctggtccagcatcctttgtgtacagaggtgctcccctttggtgcatttcagtttatcttccaagtcatcaattgtcttttccagcttggctaccgatctctcagcaaactcagcatgggtctccgcctcctttattttatcagtaagaatcttgatctcttcctcatatttgtcttctttttgagagtacttttcttcagcagcactcagacacttcaggttctggtccatcagtctaatctgctcatccatctctcggcaaagggattctgccagctcagctcgttcctctgtgcgttccaagtctccttcaatgatcaccaacttacgagccacctcttcatacttcctatctgcctcttctgcaatgtgcttagcttctctgagttggatttcctggagttccatcttttcttcatcttttaaggcccggttttcaataaccttcttacctctctcactctcatcagcagctttttccgcttcttccagcttttgcagggcagtagccaggtgctcctgagcacggtccagctcctcttcaaccagctggatcccacgttcaaggaggccacctcagcctcagcctgttcccgggcccacctttctccctcaacttctcgctggaggcgctcagctcgctcctctgcatcatctgcctgctgctgcagaacctggatcttgcgcttcaccgcctcgatggtggtgatcccagccatggtgcccacccagctactgctagagctccggttcctgcctcctccgatcggcgttgcagcctcctctcacccttacttccgcctcggttcaaaatatcttaagggaaggagttgatattactccccacatcacgggaagtttacatcccctggtgatatggtttgtaatatcccagggtggatagggtgatattactctccatatcgcgaaggagtactcccccctgtgatatggttcataatatccttggggggagagtgtgatattactccccatatcgcgagggccatatactcctttgtgacatggttcgaaatatcccggtgggggagggggtagagggtaatattactccccatacagcgaagagcatacgcccttctgtggcaaggttagtaatacttcagggaaaagagtgcaatattacttttcatattgcagggaacatacactcccctgtgacatggttcgtaatatcccgggggctgagagggtgatatttctccccatatcaccgggggcctacacctgggtgtgatatggctcataatatacagggagggagagggtgatattactccacataccgagtgaggggttacacaccctcgtgacatgttcgaaataccccaaggaggagacaatgatattactttccctgtcgcgggggctacaccctcccagtgatatggttcacaatatcccggggtggagagggtgatattactccctatatcaccggggggtgtacacttccctgggaaatggtttacagtatccccggggggagagggtactattactccccatatcacgttacatatcagggtacacccccacgtgatatggtttgtaacatcccaggaggaagaaaatgatattactccccatatcgcggtggcatacacccctccccgttaaatggttcataatatcttggggtggagagggtgatattactccccatatcacgtggggcatacaccccactatgatatggttcataatatcccggaggggagagggagatattactctccatgtcgcggggggcatatacacccctgtgatatggtttgtgatatcccgggggcggagagggagatattactctccatatcgtggggtcgtacacttttctgtgatatgattcgtaatatccagacggggagagggtgatattacttcccatattgcgggggcgtacacccctctgtgatatggttcataatatcccgaagaaaagagggtgatattactcctcatatcgcggggaacacacaccaccctgtgatatggtttgtaatattcagcgggggagagagtaatattactccctgtatctcggatggcgtacactcccctgtgatatggttcataatatccagaagaaaagagggtgatattactccccatattccagggaatgtacaccaccctttgaatatggttcgtaatatccaggaggggagagggtaatattgctcccaatatcgaaggaggtgttatacggttagtaatatccagagaaggagagggtgacattactccccacatcgtggtgggtgtgcacccacctgtgatatggttcataatattcaggttaagagaggtgatattgctttccatatcgccaagggtgtacactcccgtgaaatacagttcgtaatatccaaaaggggagagggtgatattactcccatatcgtggggggtgtacacccctctgtgatatggttcataatatccagggtggaataaggtggtattactccctgtatctcggggcatgtacatcgcctgtgatatgattcataatatccagaagaagagagggtgatattaatctccatattgctgggggtgtacaaccccctgttgtatggtttgttacactgagttggggagagggttacattactctcaatatcgagtggggcatacacacttatgtgatatggttcataatatcccagggaggagagggtgatattactccccatatcgcgggaggcatacaccccaatgtgatatggtttgtaatatctacatttttttttttgagacgaagtctcgctcttgtcccccaggctggagtatgatggccggatctcggctcactgcaacctcagcctcccgggttcaagcgattctcctgccttggtcccccaagaagttgggattacaggcgcacaccaccacgcccggctactttttgtatttttagtagagaaggggtttcaccatgttggccaggctggtctagaactcctgacctcagatgatccacctgcctcggcctcccaaagtgctgggattacaggcgtgagccactgcacctggcctggtttgtaatatctatgaagggggaaggtgatattactttccatatcacgggaggcgtacaccacgatgtgatatggtttgtaatatccagggggtatactgggtgatattactccccatatcgcggggagtgtatacccttttgtgatatggttcctaatattaagctgaggagaaggtaatattactccccatatcgcaggggtttttatatggttcataatattcaggaagagagagggtgacattactctccatatcacggggtgtgtactcccccatgtgatatggtttgtaatatccagggaaggagaggttaatattactccccatatcgcagggggtgtacacctctctgtggtttgtaatatccaaagggaagaggatgatattatcttcaatatcttggggggatacagtccccagtgatattgttcataatatccagagggggaggggatgatattactcccaatattgcaggtggtgtacaaccccctgtgatattctttataatatagagggggatgatgatattactcccaatatagtaaacaacctgtgtgtacaccccctgtgatattgtttataatatccaagggtggaaaggatgatattactcctcatatcgcagggggtgtatacccctctgtgacattgttcctaatattcaggggaggagaagatgatactactcctcatatcacaggggatgtacacccccctgtgatacttttggtaatatccaggggaggagaaaattatattattccccatgtcacagagggtgtacaccccgctgtgatagtgttcataatatccaggtgaaaagaggatgatattactccgaatatctcaggaagtgtacacccttctgtgatattgttcataatatccaaaggtggagaggaggatactactccccatatcgcagtgggtgtacacccccctgtgatatggttcataatatccaatgtaggagaggatgatattactttccatatcgcggagagtgtacatccccctgttatattgtttgtaatattcagggagaaagaggatactactactccccatatcacacggggtgtatattcccctgtgatatggttcctgatatccaagagatattataatcctctcttggattatgctacctctcatatcgcatggggtgtacacacactttgtgatatcgtttgtcatatccaaggagggagaggattatattaatcccaagatcacggggggtgtacaccctcctgtgatattgtttgtaatattaaggggggagaggataatattactcccaatataattaacaccctgtgtgtactcctccttgtaatattgttcataatatccaatgggggagacgatgatattactttcaatatcgcagaggatgtacatccctttgtaacaatgtttgtaatataaaaggcaagagaggatgatactacttccaaaattgcaggacatgtacaccccccggtgatattgttcctaatatccagtggggaagaggatgatagtagtcccaatatcgcaaagggtgtacacaccccctgggatattgttcctaatataaaaggaggagaggatgctattattcccaatatcacagaaggtgtaaaatcccctgtgatattgttcgtaatattcaggaggggagaggattatattactcccaatatcacagggtgtgtacacagggaggggcaagggccagaagcgggcgggaatccccatgtttgggcggacccagtttctaatggccagcatttgccaatcaaagcttaccagagaactctaaaagccagggctttcctgctagacaagactcatttctggaactgctttaaaaagaaacaaaacttcccaaggaccccttttcctctctgtctgcctaaaataatgttttaaaaactcctaaagcagctgaattcagcccccttcctgggggaatgtatagacggaactcccacctttcccggcatcccaaggccagagtatgtgaaactcctgggtctctatgtgtgtctgagcggctgctctgccaacactccacacagccctgtgtcctggacccaaggcccttatgacctgagctcaagaggggatctcctgatccatgggttgcaaagatccatgggagaagcatggtttctggggcggggtcacacgctcagtcactgtttccctcggatgccggagatggttcctttggctctctgccaatacagggtgaatcatcatccatccctcttttctttgttctcccgggtcaagttgtttgcctagtcagtcccaatgtgagaacctgaatatttcagttgacgcgctgacttcaaaatccccgggcttcgggaggcggagcttgcagtgagccgagatcccgccactgcactccagcctgggcgacagagcgagactccgtctcaaaaaaaaaaaaaaaaaaaaaaaaaaaaaagtccccgggcttttcttttcactcagtggaaggcagctgcttctaattggccatcttggcccgcccccaccacgtgaccttctgtaaaatgcctccactctccaggaacgctctcattatataactttgcctgaaaccaacagcacgctcattgcacatatcatgggctcatttatttcacttataaagaacctggccaaggaagagatagtgcctaaagtggccagtattctgaccgatatgttagaaaaatggtgtgccgaccaattcatgacatgtgtcccaaaactagcaacggaaattgtattcgccgtgttgaggtctctaatccagatgatgctcatctatgtactggaaaaggcagagtcctttcctgacaagctgctgaaactcttcagaaacatctcatatttcctgaagaagatgatgtctggacaagcagcacaggtcgttcagatttaactttctattcatatatccagcacgatattcgcacaattgtcacgaaaccttaccagttgatgagtcctgcacatttcctttaatttcaggaggaagagggtaatccggatgagttttctgacctactctgctgctgtgattaaacaaccaccaggaaattttgacgacactgttctcctgagctcctccctttcctccgggaacaaaacaattgaatttacaaaaataaagtgttatttgactggagtgaggtctcatgtctgcttatgcggtggctcgctgctcagaacagggtgagtctctgggttgtgtgctgaggaggggaggctctcaatctggagaaaacccactgcaggggacacctccatggggtctgagggactgaggatgaggagccggactgggtctagggaaggaggaggtttcagagggtgaaattctggcactaaagcctgggggtgtttgggaacttcctccttccgaagaagtttcagggagggataaagacaaaccctgggctccttgaggggcccttactaatttgagaggactctatcgggaaggagagtgacaatggcctccttgaggactgaggcccctgaataaatgaggcccagatacagtccatgggggatgagaccttcaagggtcacattttggttgggacagaggaaaagtgcagctctgcagccgcagaggaaaacccggcagtgtgaaagcgaccttggaggggccctgtgcgctctgaatgcgtctgagcccccatcccctgtccccgcctctctttctggattcttccagctcggctgtctccgccatcttctgagcgctccaccctgacttattcaagtttcccttctgccttccaagtactccaaaatctttcagatctgtgtccctacccctgtttttagcatgtgttggggctccaggtccctgaaggtttctggcctgaaatccacctccccagcggagtggactgcgttctagagactccacactccgcgaggttcccaggcccctgagggacaaccgagtggcctgcgcacttcagggctccacactcggcaaggtctttcaagcccttggggtccccttcttagttttttccacctttctgggctgcagtcactccataaatgctgggatctgatccccacccccactctcgtttcctcaattctgcgggctacacgctctggcaaggtcctccgggccctggatcccctccctctccctatgcccacgctcctagtcagcccttctggggtccactattttcaggaactaaccgttctcatggagccttgctaaccggaaagctgtgtggaagaaaggctttgaggatagaggtggagatttggctcttccatagtgccactcacccaccccaccatgctgccactgccagacccggacccctgtttcagaacaagtgaccagattcgctcctggacagccctggacactggccttttctctgaaaactactcaccctttctctagtccccacttcatgccagcctcataccctcttccttcccccacgctggcttccgggatcctcctctgctcagacaacctcttctgtgtcccacccccgtttttagaatgctttggggcaccaggttgggggaaggtttctggcctgatatccatctctttccaaactcccttcttcccttgaaaggcttcttgccttcagccccacttctggctccgaggtttcaggacaccctcctcttcatcctcattcttttgaccaccagctttttaggaattcgaacgtccctctcatcttcgtgaatcctgtccaggcatttgttgaccccttcatctgatacccctgacctcacattgccaaaagtctacccctacccagtacactggaattagacaaaatcccaggagttttacctcaactctgagtgtgcccacaggagctctccctgaagccacgtccttttaagcagggtctagggttcctcccttgtcttaatgaactctttgtcacacggaggacgttatggagcccttatgatctttcactgcctttctgcccagcgttttgtctttccatggacatttataatattttccatggacattttgttctctcaatgtccacccctaatttccaacatcccaaagattctcatgtgtttcctgaaagccatttacaggaatggctgtgcccagacccccttccccaggatcctccttcacacctggtaggtgcctctcctagagagatttgcactcagttgtcgtgcagtcacatggcccagatggttgttaatcacccccttcctggcaacagctagcagccagggaatcactggcacagaaacctcagggtgaccaagatgaggccacctctgtgctgaaggctgtgctccagagcctgcttgggatcaggcttaagcaggtcttcagccagacctgatgttacctggtttccttgagctgccctgcctgagctatcgggagcactccctcaatgcacatcttgattccctatctcatgctctgcttctagaaaccatgagctatcaattgctactggcaatggtcctgggaagtcaaccctaagtatggattctggggttggatgactccccacaggacttcagtgagcaacaatcactgctggcagttggaggacagagtcgctagggcatgtgaccactgtgaaaccaccgatgtttcacctggggtaattttggatgaactacggtagaagcactgaaggtacattgcttttggtttggaagattgtaggtaaataatagcgatatgaatgtggaattggatggctgcaaacgagtgccattgatgcattgaaagaggaaaagtcaggctgtcacctgtcactcagcaatttaaagtgtgagagttgggactagatgtggtggctcacatctataatccagagattcgggggaagcttgaagaggtaggatcttttgagtccaggagttccagaccagcctggacaccagagcaagacctcatctctacaacaaaattttcttaaaaattagatgggcttggtggcacgcacctgtacttgtagatctagctaatggggagcatgagataaaaaaatcacctgagtcagggacttaggggttacaatgaggtatgattgtgccagtgcacacactcccacctggccaacagagtgagattctgcttccaaaaaaataagaaataaatcaggtttgagagttggaaagcatcatcttctcctagagccaaaggacatgtacaactgagacccaggaacaaagcttcatcacaaagagaccatcatcagtggagccgggagatgcattccccctcaccctgccttgaggaggcagtggagtcatctgtctgggatcctttctgacccagccctatttgtttgtctctttggcttctttggatttgtatattttagctgttataacactgtaaaacaaacagagtgatttttttgagttgtgtgaatgatgctagctccatagtcaccctgagagtgatgggaacttttgaatttgtggcaagttggagggtagtgtaagtgacctgagattgccaaattggggctagcactggatgtgaggttaggctagtggaaaaatatgcccagaaccagaggagtgtgggctcactgcaggtggttaggctcagatccaaattgtacagatggatagctttggggtaaagaataacatagttgagaagtgcatgtgttagtctgttcatgcactgctataaagaattacctgagactgggtaattatttataaaactcaggtttaattgggtcatggttccacaggctgtacaaaaagtatgatgctggccatcagctcaacttctggggaggccccagaatagttagagtcatggcaaaaagtacaagggaagcaggctcatcttccacggccagagctggagcaagtggtaggagaggtgatacacactttcaaacaagtaggtcttttgagaactccatcaccggacagcacctatgggatggtgctaaattattcatgaaatatccgcctccataatccactcaactgtcaccagcgcagccagccccacctccaacagtggggattacaattccatatgaggtgtgggtggggacacagctccaacctcaatcagtgggcatcctggattgggtctactatagaaggagaaccaggagctgactatgatcttgaaccctacccatgatggccgggcggggtgactcatgcctgtaaccccagcactttgggaggctgaggtgggtggatcgcctgaagtcaggagttagagaccagcctggccaacatggtgaaaacctgtctctactaaaaatacaaaaaattagaccggcgttgtgctggatgcctgtaatcacaccactacgctccagcatgggaaaaaataccaaaacttcgtctcaaaaaaaaaaaaaaaaaaaaaaaaaaaaagactgcccatgaccactgcaccagtgagagggacaccagcatcactgagatgcaagggctggacattcttcataggtcagagctcaaagcaggggacactgatacagagatgggctccatccatagcaccaaagtggtgagaggatgtgggaatggcagaggccagcactttgccatcaatgcaagggggtataaggaggtgacaccagtgccagagtacatcacggggggactgccctacaatatctaggacttacctcttagagcgtgtttcattagcgacaacagatataaatggcagacaggtgtgtccctgcattaacaggaaatagaaatcatcaagaggaacagaaggcagatgtcagcagccccttagaaagtcatcatccttcatacagttaaaatctgagacagttctcacacgagaaggcctaactcaaaaagaggctgggttctcatgaggcaggtttatgcaaaaccaaggaaggtgtacaagtttggaattctccagtttcccttggaaaagacctacagtcatttgcttaggtaactgagcactgaacaaaggtgagtattgttgtcttttagaagctcttggccaagaaggccttgttggcataaaacccatggtttggaaacatcaccatgacccctgttagagtaatggcctaagggtgggggtcaggaaattgatgtattccttgccaacttctgcctctaagtgagtgaactctgtttgtgaacctctctcctctgtggttatgttcctaggctctcatgtataatcaggagtcatagacttagaaacaggaaaaatacttacagtgtttttgtggcctgtgagctatgacttataattttaggaaaaaaacaattgcaaatggaaagcctaagtctatcaatgctcatccaagacaacataatcaataaaaaccaatatcaaatctcaaggcaaattatttcctgtatatagatggcagagatgagcaccaccatcaaaaactcaaggaccagtgctgtgggtccagtcatctgtttcatggaattcaccagtctggtatcttcaaaatccagaaggatgatggcagatggcaggaaagtaatgcaaacgtcatcaggtgtgaccccactgtagcagctgtgatggatgttttctctcaccatagcaataaataacacaacctcggtcacactgtatgcattgttggtctgcaaaatccatgttttgcaaaactcttcaggaaggtggatctgtaatattggcattgacatgagaacaacagcagtatttattcacaatctcaagctctctgtcttcccgtctctctcattagccatccaagtagtcctgaggaaccaagcccatcagaacattctgcaacataatacacagctccattctccattcaaattttgttgttgttgttgttgttgatgagacaacatcttactccatcagccaggctgacgtacagtggggctatctgggctgactgtagtcttgagcttccaggctcaaggcatcctctcacctcagcctcctaagtggcttgaactacagacacacagcgacatgctgggctagtttttgtatattttgtagagacgtgctctcaccatgttattcaggctggactcaaactcctgagcgtaagtgatccaagcaccttggcctcaaagtgctgagattacaagcctgagccactgcacccagcccaatctccattctactgataacaatgtcattaccaggtctgatggacaggaaatggtaaggtttctgaaaacctaaggatcacacagcgagttccaaaggctgaaagtgcatacctgtcgacactgataccaatgacatccaatggtgagaatgacattccttgtagtcctagctctgctcataacaaatctatactgaagtgtaagagtttgatggtcatggggattttccatgtctctgcctttcagcgatgtgccatatctgtgaagtgttcagaaatgcaacagcctgaggcatgctgggcatatcctctaataaaaaggaaaatgccattttatggtcctgtatttctacaagttggaacacatgggcctgtgatccagatgggggaaatgggaatattcccactcattcaccttcatccacgaagcccatttgaaagctttgggcttcccatccttgtagattttagtgttgtgggctgggtgcagtggctttcacctgtactgccaacactttgggaggcctagacaggtgaatccactgaggccaaaagttcgagaccagcctggccaagatggtgaaaccccgtccctactaaaaatacaaaaattagcaaggtattggggccagcacctgtaatcccagctgctcgggaggctgaggctggagaatcgcttgaacccaaaaggcagagactgcagtgacccgatcctgcctttgcactccacctgggcaagcagaacaaaacttctgtcttgaaaaaaaaaacaaaaaacgaacaaaaaagatgttagagttctgggtttagaggtctataccccagaaagagaatggtttcaacaagggacaaagaagttgctttaaacgttgacttgccatttcttttcagtgtgtttgttctcttgcgtcaagagaccaccagaaaagtggtgcaattactctcctgtcaagaatcattgactatcatctgcaagagggtcagatcctggtatataattagggcagaaatacttagtctgagaagggtatgacatccagaggccctattaatgatgtccttttctccatgcctgactctgaccccatgtgctggactgcccctgtgtggatggcctcatggcctgctcggactctgaggtcccaccccaagtggcacctccatggagggctctactcttgtatgggctctgacactcacactgagacactctcccatggacacctcttcacccacttggggtctgaaactgggctactccatccctccctaacctggaacagagagctttcactgctattacacaagtcatagaggctaactcctcatttttccaagctaattattgaaacattagtcctgggttgataagacaagataagttaacttttcataaatttgcttatcaagttttgaataaattcaaataaattcaccttccccacacaccttagttgtcgacatcacacgcgcacccatactcacagggtgagcacgaaggcttcactgtcagtggagaaagtggcaaaacccttctgtgcctcatcctggtctagacctggccctcatcctttcccactcttcccctcactcccttggattcatccacactggcctcctgcctgctgctccacctccctgcgaagctcacccctgcctcagggcctttgcacgtgcagtggcttcaagccatatcctcttcacccagatctcccagatctcctgaatgatcttcttttatcattcaggtctcagcttgcatgtaatcttctcagtgaggattacccaaaccacatagttcattcattcattcaaatattcattcaatggcatattgacaaagcagctacttcatgccaggccttgggccaggtgttatggatatggcaacaaacaaaacaagagttttctgctctcaaatttttacccacttaaaggagatatcatacatcatctgtaaataaatacatcatctgtaaataatgatgtaaataaatacatcatctgtaaatctgtaaataatgatgtaaataaatacatcatctgtaaataaataaagtataataaaagaaaatagtaggtttttttggttggaggtgaccgtgaagtttgcaaataccatcttacaacacattattttattttatttcatttcatttttaattttattattattatactttaagttttagggtacatgtgcacaacgtgcagatttgttacatatgtatacatgtgtgaagttggtgtgctgcacccattaactcgtcatttagcattaggtatatctcctaatgctatccttcccccctcccccaccccacaacagtccccggtgtgtgatgttccccttcctgtgtccatgtgttctcattgttcagttcccccctatgagtgagaacatgcggtatttggttttttgtccttgtgatagtttgctgagaatgatggtttccagcttcatccatgtccctacaaaggacacgaactcatcattttttatggctgcatagtattccatggtgtatatgtgccacattttcttcatccagtctatcattgttggatatttgggttggttccaagtctttgctattgtgaagagtgccgcaataaacatacgtgtgcgtgtgtctttatagcagcatgatttataatcctttgggtatatacccagtaatgggatggctgggtcaaatggtatttctagctctagatcactgaggaatcgccacactgacttccacagtggttgaactagtttacagtcccaccaacagtgtaaaagtgttcctatttctccacatcctctccagcacctgttgtttcctgactttttaatgatcgccattctaactggtgtgagatggtatctcactgtggctttgatttgcatttctctgatggccagtgatgatgagcatttcttcatgtgttttttggctgcataaatgtcttcttttgagaaatgtctgttcatatccttcacccactttttgatggggttgtttgtttttttcttgtaaatttgtttgagttcattgtagattctggatattagccctttgtcagatgagtaggttgtgaaaattttctcccattctgcaggttacctgttcactctgatggtagtttcttttgctgtgcagaagctctttagtttaattagatcccatttgtcaattttggcttttgttgccattgcttttggtgttttagacatgaagtccttgcccgtgcctatgacctgaatggaaatgcctgggttttcttctagggtttttatggtttgaggtctaacatgtaagtctttaatccatcttgaattaatttttgtataaggtgtaaggaagggatccagtttcacctttctacatatggctagcctgttttcccagaaccatttattaaatagggaatcctttccccacttcttgtttttgtcaggtgtgtcaaagatcagatagttgtagatatgtgacattatttctgaggactctgttctgttgcattggtctatatctctgttttggtaccagtaccatgctgttttggttactgtagccttgtagtatagtttgaagtcaggtagcatgatgcctccagctttgctcttttggcttaggattgactttgcaatgcggggtcttttttggttccatgtgaactttaaagtagttttttccaattctgtgaagaaagtcattggtagcttgatggggatggcattgaatctataaattaccttgggcagtatggccattttcacgatattgattcttcctacccatgagcatggaatgttcttccatttgtttgtatcctcttttatttcattgagcagtggttttagttctccttgaagaggtccttcacatcccttgtaagttgggttcctaggtattttattccctttgaagcaattgtgaatgggagttcactcatgatttggctctctgtttgtctgttattggtgtataagaatgcttgtgatttttgtacattgattttgtatcctgagactttgctgaagttgcttatcagcttaaggagattttgggctgagacaatgggttttctagatatacaatcatgtcgtctgcaaacagggacaatttgacttcctcttttcctaattgaataccctttatttccttctcctgcctaattgccctggccagaacttccaacactatgttgaataggagtggtgagagagggcatccctgtcttgtgccagttttcaaagggaatgcttccagtttttgcccattcagtatgatattggctgtgggtttgtcatagatagctcttattattttgagatatgtcccatcaatacctaattattgagagttttcagcatgaagggttgttgaattttgtcaaaggccttttctgcatctattgagataatcatgtggtttttgtctttgggtctgtttatatgctggattacatttattgatttgcatatattgaaccagccttgcatcccagggatgaagcccacttgatcatggtggataagctttttgatgtgctgctggattcggtttgccagtattttactgaggacttttgcatcaatgttcatcaaggatattggtctaaaattctcttttttggttgtgtctctgcctggctttggtatcaggatgatgctggcctcataaaatgagttagggaggattccctctttttctattgattggaatagtttcaggaggaatggtaccagttcctccttgtacctctggtagaattgggctgtgaatccatctggtcctggactgtttttggttggtaagctattgattattgccacaatttcagatcctgttattgctctattcagagattcaacttcttcctggtttagtcttgggaaggtgtatgtgtccaggaatttatccatttcttctagattttctagtttatttgcgtagaggtgtttgtagtattctctgatggtagtttgtatttctgtgggatcagtggtgatatcacctttatcattttttattgcatctatttgattcttctctctttttttctttattagtcttgctaccggtctatcaattttgttgatccttttaaaaaaccagctcctggattcattaattttttgaagggttttttgtgtctctatttccttcagttctgctctgattttagttatttcttgccttctgctagcttttgaatgtgtttgctcttgcttttctagttcttttaattgtgatgttagggtgtcaattttggatctttcctgctttctcttgtgggcatttagtgttataaatttccctctacacactgctttgaatgtgtcccagagattgtggtatgttgtgtcttttttctcgttggtttcaaagaacatctttatttctgccttcattttgttatgtacccagtagtcattcaggagcaggttgttcagtttccatgtagttgagcggttttgagtgagtttcttaatcctgagttctagtttgattgcactgtggtctgagagacagtttgttataatttctgttcttttacatttgctgaggagagctttacttccaagtatgtggtcaattttggaataggtgtggtgtgatgctgaaaaaaatgtatattctgttgatttggggtggagagttctgtagatgtctattaggtccgcttggtgcagagctgagttcaaatcctgggtatccttgttaactttctgtctcattgatctgtctaatgttgacagtggggtgttaaagtctcccattattattgtgtgggagtctaagtctctttgtaggtcactcaggacttgctttatgaatctgggtgctcctgtattgggtgcatatatatttaggatagttagctcttcttgttgaattgatccctttaccattatgtaatggccttttttgtctcttacgatatttgttggtttaaagcctgttttatcagagactaggattgcaacacctgcctttttttgttttccattttcttggtagatcttcctccatccctttattttgagcttatgtgtgtctctgcacgtgagatgggtttcctgaatacagcacactgatgggtcttgactctttatccaatttgccagtctgtgtcttttaattggagcatttagcccatttacatttaaggttaatattgttatgtgtgaatttgatcctgtcgttatgatgttagctggttattttgctcattggttgatgcggtttcttcctagccttgatggtctttacaatttggcatgtttttgcagtggctggtactgactgttcctttccatgtttagcgcttccttcaggagctcttttagggcaggtctggtggtgacaaaatccctcagcatttgcttgtctgtaaaggattttatttctccttcacttatgaagcttagtttggctggatatgaaattctgggttgaaaattcttttctttaagaatgttgaatattggcccccactgtcttctggcttctagagtttctgccaagagatcagccgttagtctgatgggcttccctttgtgggtaacccgacctttctctctggctgcccttaacattttttccttcatttcaactttggtgaatctgacaattatgtgtcttggagttgctcttcttgaggagtatctttgtggcattctctgtatttcctgaatttgaatgttggcctgccttgctaggttgcagaagttctcctgggtaatatcctgaagagtgttttccagcttggttccattctccccatcactttcaggtacactaatcaaacgtagatttaatcttttcacatagttccatatttcttggaggctttgtttgtttctttttactctctttcctctaaacttctcttctcacttcatttcattaatttgatcttcattcacttatatactttcttccacttcatcaaatcggctactgaaggtattgcatgcatcatgtagttctcatgccatggttttcagctctatcaggtcatttaaggtcttctgtacattgttttctctacttagccattcgtctaatcttttttcaaggtttttagcttccttgtgatgggtttgaacatcccctttagctcagagatgtttgttattactgaccttctgaagcctgcttctgtcaacttgtcaaagtcattctccatccagctttgttccattgctggtgaggagctgcgatcctttggaggagaagaggtgctctggtttatagaattttcagcttttctgctctggtttctccccatctttgtggttttatctacctttggtctttgataatggtgacctagagatggggttttggtgtggatgtcctttttgttgatgttgatgctgttcctttctgtttgttagttttccttcgaacagtcaggttcctcagctgcaggtctgttggagtttgccggaggtccactccagaccctgtttgcctgggtatcaccagcggaggctgcagaatagcaaatattgcacaacagcaaatattgctgcctgatccttcctctggaagcttcgtctcaaaggggtgcctggctgtatgaggtgtcagttggcccctactgggaggtgtctcccagttaggctagatgggggttagggacccacttgagaaggcagcctgtccattcacagagctcaaacactatgctaggagagccactgctctcttcagtgctgtcagatggggatgtttaagtctgcagaaatttctgctgccttttattcagctatgccctgcccctacagatggagtctacagaggcaggcaggcctcattgagctgcggtgggctcctcccagttcgagcttccagaccactttgtttacctactgaagcctcagaaatggtgaacacccctcccccacccagtctgccgccttgcagttccatctcagactgctgtgctagcagtgagcgaggctccatgggcgtgggacccactgagccaggcacaggatataatctcctggtgtgccatttgctaagaccattggaaaagcacagtattaaggtgggagtgtcccaattttcccagtacagtctgtcacgggttccctcatctaggaaaggtaaatcccctaaccccttgtgcttcccggtgacgcaatgccccaccctgcttcagctagccctccatgggctgcatccactgtccaaccagcccaatgagatgaacaaggtacctcagttggaaatgcagaaatcacccatcttctgtgtggatcaggctgggagctgcagaccggagttgctcctattcggccatcttggaatggcaatctatgtttgctttttacatttgaaaaaactggtgtcacgtacctaggtattaatcattgtggtatcctcttgccgatttacctctttatcattaactagtgaccctccttgtcttttgttgttacagtctgtgattttagtctattttatctaatatgagaatagctactctggcacttttttggtttccagcttcatgaaatatccttttccatttccctgttttcatttccctttcggtgtctctatagatgaagttgatttctttaaggcaccataagttgggtcttatttctttatccatttgaccatttagagaatttagaacactgtcagtgttattattcataagtaaaaacttaagagtgggtgtagtggtgtacatctgtatttcctgcactttgagagactgaggcgagctgatctcctggggtcaggagtttgagaccggcctggtcaacatgatgaaaccctgtctctactaaaaatacaaaaattagccaagcatgctggcatgtgcctgtaatccaatttacttgggaggctgaggcaggagaagcttgaacctgggagacaaatgttgcagtgagctgagatcacacagagaagtcatctccactctcctcatcagaacctcttgttcacagcatttgtgagcacaaatcaatgatggttattctttcctactaattagggatattttattacacagcaatagcctccagcaaagggaaccatcatacatgattcctacaagttgacagggctggaattatcactgaaaaactaaggtggctatacttgattcccaatgtccaatttttcatgaatagagaaatttatcctttttccccccagccagaaaccaagttttgctcttacgcccaggctggaatcaagtggcacaatctcagctcactgcaacctctgccccccagcttcaagaaattcaccttttgaacaaggagatattaaggatacactatgtgtatgctaccggtggttgcaggagactcagaaaagagagaaacagtcactggcctcgtgcaactgatattctcgggaggagagaaaggcaatcaagaaagaaacatgctgtatttcagacagctgtaagtcctccacaagaaaagaaagcaggtgaggaacataggaaatgtgtcaaccataaggttcccgctaattctataagttggtcagggatatcctccaagaataagcagcatctgagcaatcacctgaagggaggaaggaaggaagactgtgagtggtggcttacacctgtaatcccagcactttgggaggccaaggagggcagattgcctgagctcaggagttcacgaccactcagagcaacctgttgatacccaatctctactaaaaacacacaaaaaaattacccgggtgtggtggcacgcacctgtagtcccagcttccatgcccagctgatttctctctctccatatatatatatatatacacatatattgtttttgcagagatagggtctcactgtgtcacccagtcatcaagcaattctcttatactgttttggaaaagcatgggaattacaggtgtgaaataccctgctggtcctgaaaaatgtgatatttgggattctctgcctggcttgttttacccaaaataatgacctccagttccttccaggttgctgcaaaagacatgattttcactgttttataactgaatagtattcctgtatgtatacataccacattttctttatttattcttctgttgattgacatgtagggtgattccatgtctttgctactgtaaataatgctgcagcaaatatttgtgtgcattttgatctattcctttgagtaggtacccagtactgcaactgcaggactgagtagttgttatattttttgttctttcagaaatctccatagtgtttgccataaaatctgcactaatttacattcccaacaacaatgcataagatttccccttttctccacattctcactaacatttgttatgtttttgtctttttcataatacccattctgactggagtaagatatctcattgtggtggttgttgatatttttgagacggggtctcactctgttgccagactggagtgcagtggtgtgatcgtggcttgctgcaacctccacctcccgggttcaagcaattctcctgcctcagcctcccgagtagctgggactacaggcgcgtgccaacaggcctggctcattttttgtatttttagtaaagacagggtttcaccatgttggccaggatgatcacagtctcttgagctcatcatacacctgcctcagcctcccaaagtgttggaattacagtcatgaggcagcgcacccaacctcaatgtggttttaatgaccatttctctgacgattcatggtgtggagaatttctttgaaataccttttggccatttatatgtgctcttttaaaaactgactcctgtccaggtgcggttgagcatgcctgtaaccccagaacttcgggaggctgaggccaatggatcacttgaggcaaagaggcagaaatcagcctggccaacaaggcaaaaccccatctttactaaaaatacaaaaaatcagccacgggctgtgactcgtgcctgtggtgcaagttactcaggaggttaaggcacaggaattgcttgaacccggtaggcacaggtcacagtgagccaagatcatggcactgcactacagcatgggtaatagagaaagacctgtctcataaaaacaaatgaataaataaataagataaaaaataaaaaagtctctttatgtcctttgccgactttttaatgggattctttggagttttctgttgtagttgagatctttgtttactctcggtattagtcttttgtcaaaggaaaagtttacaaataatttcttccgttctgcagtttgtctgctcactctgttgagaggattatttctttggctgtgcagcagctttttgtttcagtaaagcttttgaatttatataattaaaattttcagtttggtttaaatttgcactggtcgatttttggttttgttgcctgtacttttgaagtcatactcttgaactctttactagacaataaccagaagagttttctctagttttcttctcacatttttattatttcagtacatatatttaagtctataattcatcttcaattgatttttgtagaaatagtgagaaataggagtccaggtttattcttctgcaaatgacaattcaattgttccagcaccaattattgaaaagggtgtgctttcctcaacgtatattcttatcagctttgtcaaagatcagttggctataaatgtgtggctttctttctgggctctctagtctgttacatcaatctgtgtgtctatctgtatactactaccatgctgtattggtgatgatggctttgtaatataatttgaagtcaagaaatgtgatgctcccagctttgtttatttgcttcagaaaggctgagtcaacagctgcagagatgaagctgcccctcctcgcagggctccttcccggaaaaagatcatggctcccactgaccatataaccatggctggaactcctgaaattcccaaagggaggccctacccagtgaggggggatgaatgaaggtcctacttaaggaatctgtctggccacaatcaggcacagcagctgtgctgccttgtgggggaccagaccacctggattccctggagcctgcaggctagaatgtctgagtccatggaaacacagaaatggaggccgccctcacctccccagaaaactgtagtctcaggcagtctccagccgattgccactggttggctgctattccaagccagtgggtcttaacttgagaggtgctgtggaagtggggcccacggaatgaggctgcttggctccctggattcagccccttttctaagggaatgtacagatggaactcccgccttgcccagctttccaagtatataaaactcctgagtctctgtgagtgtctgagcgagtgctctggcaacattcgacacggctctgtgtatctgacccaagacccttatggcatgagctaatgggaggatcttctgatccatgcgtggcaaagatgcatgggagaaacatggtttgtgggtaggggttgtgcattcactactgcttctcttggctgtaggtgaaggtttctttggctctgtgctgatactgggtgcaccatcacccaccccctttgtttcttctcctgggtcaagtcatttgcctaatcagtcccaatgtaggaacctggatacttcagttcaaggtgctgaattcaccgtgcttttcattcaggggaagacagctgcttctcattgggcatcttggcctgcccacttcacgtcactttttgtaaaatccacaccactccaggaatatccattacttaacttcgcctgaaataaacagaaggctcattacacttatcatgggctcacttacttcgcctataatgaaggtgccatggaaatgctagtggatgacgtggtccattttcttagggatgagatagaaaaatggtgtatggctttttaatttaattaaaatttttagtttggtttaaatttacattggtctctttttggttttgttgcctgtacttttgaagtcttactcgtgaactctttactggacaatgaccagaagagttttccctaagtttcttctgatattttgaccatttcagtacatacatttcagtctataattcactttaaattgatttttgtaaacatggtaagaaataggagttcagatttattcttccgcatatgataatgcaactgtcccagtaccaattattgaaaagggtgtgctttccctagtgtatattcttgtcagctttgtcaaagatcagttgcctatgaatgtgtggctttcattttggattctctcgtctgttacatcaatctgtgtgtccacatttatacctgtaccatgctgtattggtgactatggctgtgtaatatattttagagttaggaaatgtgatgctcccagctttgttcatttgcttcagctgaaaaggttgagtccacaattacaaagatggcagccgcccatccccggaggacctccaacccagaaagagatcaggcttcccaccaaccctataaccctggctggagttcctgaaattccaacagggaggaccttcccagtgaggagggatgaatcaaggtcaaatttaaagaaacagtctggccactatcaggcacagcagcagtgctgccttgtgggggacccctcctgctccagaccagctgccctccctggagcccgaaggctagattgtctgagtctacggaaacagagacggtggccgccccaaccacccagaactcggtagtctcaggcacttggcttgctatcttgccactgcttggctggtattccaagcccgtgggacttgagaagtgctgtgatgatggggaccacaggatgaggctgtctggctccctgtgatatggctgtgatgagtggaggaacaccagggctcatgtctcacacagaattggagaaaatgacacaaacacatgtacagtggttttatggcgtgcagtttaataggcaagaacgaaggaagagctccccatactgagacagagggaggggggctccaaagccaaaagaggaaacccggagtgctgtggataccaatgagttatatgaagaaactggagggggcggtgtctgatttgcatagggttcaggcgattggttcgaccaggcatgtcatttatgtggcccacggaaaaactggccctcccacctagcctttgaatatgcacgtgccggacaccctgatttcctacactcatggggatatatgggggtggccatatcgccaggcacaggtggggacaagggccagaagagggcgggaatcgctatgtttgggtggacccagtttctaatggccggcatctgcagatcaaggttaccggagaactctaaaagccggggctttcctgctagacaagactcatttctggagctgctttaaaaagaaacaaaacttcccaaggaccccttttcctccctgtctgcccaaaataatttcttaacaactcgtataacacctgaattcagcccccttactgggggaatgtaccaacggaactcccacctttcctggtttctcaaggctagattgtgtaaacctcctgggtctcggtctgtgtctgagcagctgctctgccaacactccacacagccctgtgtactaggcccaaggccgccgtgactcagcccatgggaggatctcctgatttcttggttgcaaagatccatgggagaaaaatggtttctggggcggggtcacacactcatggcttctcttggctgtgcaagaaggttcctttggctctgttccaatatagcgtggttcatcacccacccctgttttctttgttctcctgagtcaagttgtttgcctagtcagtcccaatgtgagaacctgaatatttcagttcacgtgcttatcgtgaaattcactgagactttaattcagtggaaggcagcctcttctaattggccatcttggcccgccccctccacgtcacctcccataaaatggccacgctctccagggacgatgccattatatatctttacgtgaaaccgacagaacacttattacactttttgtgagctcatttacttcacttataatgaacatggccatggaaatgctagtggagaaagtggtcgattttctgatggatgtgataaaaaaatggtttgccgaccaattaatgacatatgtctcaaaactagtaacgagacccttaatcgctgggttgaagtttctaatcaagaagatgctcatctatgtattcaacaaagcagcttcccttgcttctgaaatgcttccaaacaacatctcatatttcctgaagaagataatgcctggacaagcagcacaagtcattcaggtttactttcagctcataaatccagcaggatattcgcacaattgttgggaaaccttatcagttcatgagtcgtgcatgtttcctttaatttcaggaggaagagggtaatctggaagagtttcctgacctactctgctgctgtgattaaacaaccaccaggaaattttgatgacactgttctcctgagctcctccctttcctcggggaagaaaagcattgaaactacaaaaataaagtgttatttggctggagtgaggtctcatgtctgcttatgcggtggctcgctgctcagaacagggtgagtctctgagttgtacgctgaggaggggaggctgtcaatctagaaaaaacccattgcatgggacacctccatggggtctggggggctgaggatgaggagctggactggatctagggaaggaggaggtttcagagggtgaaattctggcagtaaatcctgggggtgtttgaaaacttcctccctcagaaggagaagactcagggaggaataaggacaaaccatgggtcccttgaggggcatttactaacttaagaggactttatcgggaagcagagtgacaatggcctccttgaggactgaggcccctggataaatgaggcccagatccagatccagtccatgggagatgagaccttcaagggacatatttttgttgggacagaggaaaagtgcagctctgcagctgcagaggaagccttggcagtgtgaaagcgaccttggagggggccctgtgcgttctgaatgcttctgaggtccatcccctgtccccgcctctttttctggattttttgggctccatggtctccgccatcttctgagcgctccacgctgccaccttcagttttctcttctgggctccaaatactccaaaatctttcatatctgtgcccctacccctgtttttagcatgtgttgggactccaggtccctgaaggtttctggcctgaaatccacctccccagcggtgtggattctgctctagagaccccgcacttggcaaggttcccaggcccctgggggacaaccgagtggtatgtgcacttcagggctccacactcggcaaggtctttcaagcccttggggttccctcctcagttttcttcacatgtctgggatgtagtcactctataaatgccgggatgtgatccccaccccagtgattttttttagttccatgagtgttgctatctgaatagtcatcctgagagtgatgggaccttttgaatttgcagcaagttttagattagtgtgagtggcctgagatcgcaaaactggggctagcattggatgtgaggttaggctggtggaaaaatttgcccagaacctgaggagtgtgggctcactgcaggtggttaggatcagcacagaattgcaaggatgtatagctttggggtaaagaataacatggttcagaagtacatgtattagtcttttcatgcattgctataaagaattacctgagactgggtaattaattataaaaactcaggtttaattggctcatggttccacaggctgtacaaaaaggatgatgctggccatcagctcaacttctggggaggcgtcagaaaacttagagtcatggcaaaaagcacaagggaatcaggctcatcctccatggccagagctggagctagtggtaggagaggtgctgcacacttttgaacaatcagatctttttagaactctatcaccagacagcacctagaggatggtgctaaattattcatgaaatatccacccatatgatccactcaattctcaccggcccaaccaggaccacctccaccattggggattacaattacacatgagatgtgggtggggacacagatccaaactcgatcagtgggcatcttggactgggtctactatagaagaagaaccaggagctgactatcatccttaagactgcccatgatggccaggcagggtggctcatgcctgtaatcccagcactttgggaagccaaggtgggtgaatcccctgaggtcaggagtttgagaccagcctcgccaacatggtgaaaccctgcctctactaaaaacacaaaaaattagatgggtgttgtgccagacgcctgtaatcacagctactccagaggctgaggcatgagaattgcttgaacctgggaggcggaggtggcggtgagccccaatcgcactgctacactccagcatgggcaacaataccaaaacatcgtctcaaaaaaaaaaaaaaaaaaaaaaaaggctgcccatgaccactgccccagtgagagggacaccagcatggctaagatcaagtgctggacattcttcatgggtcagacattaaagcaggccacactgttacagagatgggctccattcatagcaacaaagtggtgagaagatgtgggaatggcagaggccagcactttgccatcaatgcaaggtgggcataaggagctggcaccagtgccagagtgcatcaggggaggactgctttgcaatatctagcacttacctcttagagtatgtttcattagggacaacagatataaatggcagacaagtgagtcccttcagtaacaggaaatagaaatcatcaagaggaacagaaacagatgtcagcagccctcatataaagtcatcatccttcatccagttaaaacctgagacagttctcacataagaaggtctaattcaaaaagagactgggttctcatgaggcaggttcatgcaaaaccaagggaagtatacaactttgggattctccagcttcccttggaaaagacctacaatcatttgcttaggtaactgagcactgaacaaaggtgagtattgttatctttcagaagctgttggccatgaaggtcttgctggcataaaacccatggttggaaacatcaccatgacccctgttagagtaatggcctaagggcaagggtcaggaaattgatgtattccttgccaacttctgcgagacgagtgttggtccactcatctctttcacggaattcaccagtctggtatcttcaaaatccagaaggatgatggcagatggcaggaaactaatgcaaacaccatcagttgtacctccactgtagcagcagtaatggatgttatctcttcattgtaatatccagggagggagaagatgacattattctcaatattctaaacaccctgtgtgtacagcctctgtgatattttttgtaatatccgtgtgggagagaattatattactcctaatatctcaggggttgtgccccctctgtgacaatgttcctaacacccaggaggggataggatgatatcacttttagcatcacagggggtgtacaccccactgtaatattgttcataatatccgggggggagagaatgatattactcccaatatcgcaaagactgtacaccaacctgtgatattatttgtaatatccataagaggaagaataatattactcccaatgtcacaggaagtgtacacccttctgtgatattgttcaaaagatccagttagggaggggatgatattactctcaatatcttaaacaccctgtaggtaagccctctgtgatattcctcataatatccagagggagaggatgatattactcccaatattgcatgaagtctacaccccacctgtgatattgttcctaatatccaggatgggagaggatgatattactcccaatgtcgcaggggatgtacaccttccctgtaatattgttcgtaatatctagaaaaggagaggataatattactttcaacatcgcagggggtgtacaccttccttgttatattgttgctaatatccagggaaaaagaagatgacattaccaccactattgcagaaggtgtacacccccccttgatatagttcctaatatccagaaaaggagaggagatattactccaaatattgcaagaggtgtacattcccctgtaatatttttcctaacattcaggaagaaagagagtgatattgcccttaatattgaagggagtgtgccccccccgtgatattgtttctaatatccaagaaatgaaaggatgatattactcccaatatcacaggggctgtacagccccctcccatgatattgttcccaacatcggggggggggtgaaatagtattattcccagtatcacaataggtgtacacacctgtcgtgatattgttcctaatacccatgggggaaaggacgatattattcttaatatctcagagggatgtacaccctccctgtgatattgttcctaatatccggggtgggagaggatgatattacccccaaaatctcaaagggtgtacacccctcttgtgatattgttcctaatatccagggtggagaggataatattattcccaatatccaggaaaggaaacgatgatgttactgtgaatattccagggggtgtcctcccctctgtgatattgttcctaatatccaggttggggagattatgatatttctccaaatatcacaaggggtgtacaccaaccctgtgttattgttcctaatatcgatggggggagaggacgatattactcccaatatcacagggggtgtacaccacctttatgatattgttcctaatatccatgaagaaagaggatgatattactttcaatatcgcaggggatgtacactccccctgtgatattgttagtaatacctaggagaagaaagtgtgatattactcccaatatcgcaggggatgtacacgcttcctgtgatattgttcctaatatttagggggaaaggggatgatattactcccaatatcgaatggtgtgtacacccccccgtgattctttttttttttttttttttttttttgagatggagtcttgctctgccgcccagactggcgtgcaatggcgcaatctcggctcactgcaacatttgcctcccaggttcgcacgattctcctgcctcagccttcggagtagctgggattataggcagctgtcaccataccaggctaatttttgtatttttagtagagttggggtttcaccatgttggtcaggctggtcttgaattcctgacctcaaataatccacccaccttggcctcccaaagtcctgggattacaggcataactttccctgtgatattcttcctaatattcaggaagaaagaggatgatattgctcccaatatcgcagagagtgtgcactcctcctgtgatatggttcttaatattcagaggaggagaggatgatattactttctatattgcagaaggtgtacacctccctcgtgatgtctttcctaatatccagtgggggagaggttattagtctcaaaatcacagaaggtgtaaacccccatttgatattgttcctaatattcaggggtggggagagaaaggtattactcctagtatttcagggcatgaacacccccaccgtgatatcattcctaatatccagaaggggaggcaatgatatttctcctaatatcacaaagggtgtacaccccttctgtgatattgtaaatattctgtgtgtacacccccctgtgttatagtctgtaatatccgggtgggggagagggtgatatttctccccatattgtaggggatgtacacccttctgtgatatggttcgttatatccagggaagaaaaaggtaatattgctgcccatattgtggagagtgtacacccccatgtaatatggttcgtaatatccaggagtggagagggtgatactgctccttacatcgaggaaggtgtacaccttattgttatatgattcgcaatatccaggggaggagagagtgatattgctccccatgtcgcagggggtgtaaaccctccgtgatatgattggtaatatccaggaaaggaaagggtgatatttctccccatatcgcgggggacgtacatcctcctgtgatatggttcgtaatatccaggaggaaagaggaaaatattgctcttcataacccgaggggtgtacaacccctgtgatatggttcgtaatacccagaagtgtacacccctctgtgatatggtttgtaatatccagggggttagagggtgatattgctccccatatcgcagtgggggtacacccccctggattggttcataatattcatggggggagaaatttacatttatcctcatatcagggggggtgtacaccccccgtgatatggttcgtaatatccaggggaagaaagggtgatattgctccttatatcgcggaaggatcaccctcccctgtgatatggttcataatacccagacgggaagagggtgatattgttcttcataaagcgaagggtgtacagccccctgtgatatggttcataatatgcaaaaggggagagggtgatattgctccccatatcacggagggtgtactcccttctttgatatggttcgtaatatccaggggtgtagatggtgatatagctcgccctattggggagggtgttcacccctctgtgatattgttcgtaatgtccagggaaagagaggatgatattactcccaatatcgcagaaggtttacaccactctgtgatattgttcataatatccagggaaggagaagacgatattactcccaatatggcagggggtgtagaactcctgtgatattgtttgtaatatccaggcaaggagaggatattactctcaatatcgcagaaggtttacacccctatgtgatactgttcatgatatccagggaaaaagaggatattactccctatatcacaaagggtgtacacccctttgtgatattttttgtaatatccaggggagagaggataatattactctcaatatcagaaggggtgaaaaccctcctgtgtcattgttcataatatttagggaaggagagagtgatattactccaaatatcacagtgggtgtacacccccctatgatattgttcctaatttccagaaggggagatatgatattattgccaatatcgcagaaggtgtacaccttactctgacattgtttgtaatatccagatggggaaatgatgatattactcctaatatcacagggggtgtacacccccttgttttattgtttgtaatattcaggggaagagacgattatattactcccaatatcgcagggtgtgtacaacactctatgatattgttcataatatccaggggaggagaggaagtgtacacccccccgtgatattgttcgtaatatccagaggtagagaggatgatattactcccaatattgcaggtggtgtacacctttctgtgatattgtcatgatattaagaaggggagaggatgatattactaacaatatcacaaaaactgtacactccctgtgatattgttcataatatccagaagaagggaggatgatattattctgaatctcgcagaagatatacaccaccctgtgatatggttcataatatcctaggggaaagaggatgacataactgtcaatatcgcagggggtgtacaattccctgtgatattgttcacaatattcagagggaaaaaggataatattactttcaatatcgcaggcggtgtacacattactgtgttattgtttataatatccggaatgagagaaaattttctcccaatatcacaggaggtgtacactcccctgtgatattgttcgtaatatccagggaggggagaggatactattactcccaacatctcagggagtgtaggccccccctttgatattgttcctaatattcggaagtggagaagatgatattacttccaaaatcgcagggggtgtacactccctctgtaatattgtttctaatattcatgagtggaaagaaagatattactcccagtattgcaggggacatacaccacactgtgatcttgttcacaatattcgggggggagaggatgatattactcccaatatcaaagtaggtgtacacccccttctgatattgatcgtaatatccagaattaaagatgataacgttactcccaatattgcagggggtgtacatttttgaatactgttcataatattaagagggggaggggatgatatctgtcccaatatcgcaaagtgtgtacacctcctgtgacattgtcccaaatatccagaggaaaaaaggatgttattactcttaatatctcagagagtgtacacctccctgtgatattgtttgtaacatccagaagaaagaggctgatattactcttaatatcgcagggggtgtacacccccgccccgggatattattcgtaatatccagggggaagtggaatgttcagaatgggagaggatgatattacttgcaatatcatagtgggtgtacaccccactgtgatattgtttgtaatatccgggaaaggagaaaatgacattcctccccatatggcaggggctgtacaccacctatcatattgttcaaaatatccagaaggggagaggatatgtctccaagtatcacagggggtgtacaccccgctgtaatattcttcctaatatccagggtgtgagaggataatagtactcccaatatcccagggcatgtacaccccccttgtgatgttgttcctaaaattcatggggagaaagaatattactcccaatatcacagggggtgtacatacactctgtaatattgttgccaatatgcagcaggagagaggatgatattactcccaatatcacaggggctgtacaccccgctgggatattgtttctaatatcaagggggaaaaaggatgatattactcccaatgtcgcagggtgtgtacttcctctttgtgacattgttcctaatatccaggagagaagagggtgacattccttccaaaactgaaaggggtgtacacaccctttgagatattgtctttaatatccagaacgaaacaggatgatataactcctaatactgcaggggggtacaccctctctgtgatactgtttctaatatccaggaggggaaagaaaaatattaatcccaatatcacagggggtgtacattccccctttaatattgttcctaatatccaggaagacacaggatgatactatttccagcagcacagggcatgtacacccctttgtgatattgttcctaatatccaggaaaagagaggatgatattactgtcaatattgcagggcgtatacactggttctgtgatattgtttctaatatccgggggtggagaaaatgatattactcccaatattccagcgggtgtacacccgttctatgatattgttcctaatatctgggggagagagaatgatattattgtcaatatcacaggggatgtacagattccctgtgatattgtttctaatattcacagggggagaagggtataatactcccgatatcgcagggggtgtacactccccctgtgaagttgttcctaatatccagggattgagagaatgatattactcccaatatcacaggcggtgtaaaccccctgtgtgatattgttcctaacatccagaggaaaagatgatgatattattttcaatatcacagggggtgtacgcatccctgtgatattgtttctaatatccaggggaggagaggatgatattattgttaatatcgcagggggtgtaccccaccctgtgatactgttcctaatatccggggtggaagaggataatattgctcccaatatcgcaaagggtgtacaaccttcctgagatattggtcctaatatccagggagggagaggatgatattactttcaatatcacagggagtttacacaacccctgcgatattgttcctaatatccagcggaagaagagttaggataatactattttcaaaattgctgggtctgtaccccctccccgtgatattgtttctaatatccaggaggggagaaagtaatatgactcccaatatcttagaagatgtacaccctccccataatattatttcttacatccagggggtagaggatgattttgctttcaatatcacagagggagtaaacctttccggtgatattgtttttaatatttaaaaagagagaagataaaattactcccaatacaaaggggatgtattgtgtactcccccctctgatattcttttttaatatccagatggagagaggatgatattactttcaatattgcatgggatgtataaatcccctgtgttattgttctgaatatacaggtggggagagtatgatattactccaaatatcgcagggggttctttccccctgtgatattgttcctaacattcagggagggagaggatgatattactcttaatattgcagggggtgtacccacgcctatgatattgttcctaatatccagagggggagaggatgatctaactcagaatatgacaaggggtgtacacacagcctgtgatatggttcctaatatacaggggagaaggggataatatttctcccaatatcgcagggggtgtacaaccccctgtgatactgttcctaatatacagaaggggacagcatgatattgttcctaatatcgcaggaggtgtacaacgccctgtgatattgttcctaatatccagggcgggagaggatgatattaccctcaatatcgcagggggtgtgcactttccctgttatattgttcctatgatccgggtggggggaaatgacattagtcccaatatcgcaggatgtgtgcaccgctcccccgtgatattgttcctaatatcaagggggagagaggaggatattactcccaatatcgcaagggatgtacatcctccatgcgatattgttcgtaatattcaggaggagagaggatgatattactcttaatatcgcagaaagtggacacccaccctgtgatgttcttcataatatccagggaagcagacgattatatgactttcaatatcgctgggagtgtacatcccttttgggatattgtttctaatatccaggaagggagaggattatattactctcagtattgcaggcagtgtacaccttttttgtgatattgttcctaatattcagaaagggaaaggatgatattactcccaatattgcaggtggtgtatatccccctctgatattgttccttatatcaaggaagagaaagaataatattactcccaatatcaaagacagtgtagacccctcctgtgatattgtatttaatatccatggggaaagaggatgatgttactcccaatatcgcagggggtttacacccacactgtgatattattcctaaaatccagtggaggagaaaataatattgctcccaatattgcagggtgtatacaggccctcccccgttatattgctcctaatatccagcggtggagaggatattactttcaatttgtgtagggagtgtatacccccctgtgatatttttctaatatcaaggatgggaaaggatgacattactcccaatatcgcaggaggtgtacacgccctgtgatattgttcctaatatctagggaaggagaggatgatattactttcaatattgcaggagctgtacaccctctgtggtattgttcttaatatttaggttgggagaaaatgatatgagtccaaatatcgcagaaggcatacacacttccaataacattgttcttaatatccgggggagagggtgatattactcccaaaatctctggggggtgtacacccccttctgatatttttcctaatatccagggaaggaaacgatgatattactataaatattccaaggagtgtacaccttcctaatatcctaatattgttcctaatatccaggggtgggagaggattatattactcccgatatcgcagtgggtgtacacccctcctgtgatattgtttctaatatccaagctaggagaaaatgatatcactctcaataccacagggggtgtacaccttccgcatcatattgttcctaatattcagagggaaagaagatgaagttactttcaatatcggaggggttgtacacaacccctgtgatattgctgctagtatccaggaagaaaggggattatgttactccccttatagcagggggtatacacctcccctgtaatattgttcctaatatcaaggctgggatatacgtggggggaaggatgatattactcccaatatcgcaggggttatacaaccttctgtgatattgctcctagtaaccagggcagaagaagatgatattactcctaatatcgcaggaggtgtacactcccccattatgttgttcccaatatgcagaaaaggagaggatgacattattgccagtatcgcagggtgtgtacaccacccctgtaatattgttccaaatatttagggggagagaggatgatattactcccaacatcgcagggggtgtacacacatcccctgtaatatagttcttaaaatctaggggaaaaggggatcttatttctctaaatattgcagagggtgtacactccccggtgatattgttcctaatagccgggagggagataattaaattactttcaatatctcagagagtgtacatcgcccttgcgatattgttcctaatatccagagcaaaagagaatgatattactcccaatatcttaggagtgtacatttaacctgtaatattgttcctaatatccagggggaagagaatagtattactgccaatatcgtaggggttgtacaccttttctgtgatattgttgcaaatatttagtagagggaaagaatattactcgcaatatcacagggaatgtatacttcccctgtgatattgttctgatatccagaaaaagagagggtaatattactcccaatattgcagggggtgtacaccccccttgtgatattgatcctaatataaaggaaggaagaggatattactcctcatatagaaggggttgtccaccccccttgtgatattattcctaatattcagggaagcagaggatgatattattttcaatatcacagagggtgtgcagtccacctgtgatattgttcttaatattcggggggagaggatgttattatgcctgatatcgcagtagaggtacacccctcaagtgatactgttcctaataaccaggggtgaagaggatgatattactcccaatatcgcaggtggtgtacacccccccatgatggtttctaatatacagagggggagaggaaaatattactcccaaaatcgctggaggtctacaccccccttgtgatattgttcctaatatccaggaaaggaaacgatgatattactgtgaatattccagggggtgtacacccgctttgtaatattgttcctcatatccagggtgtggagaggattatattactcccagtatcgcagggggtgcacgacgcccctgtgatattgtttttcatatccaggaggggagattattatcaatatggcaaggggtgaacaccccctgtgatattgtacttaatagttaggttggcagaaaatgatattagtctcgatatcgcagggggtgtgcactccgcctggtgatattgcttttaatatcaagggggagaaaatggcattactcccaatatcgcagggggtgtacaccgctcatgtgatattgttcctaatatccaggtggagagaacataatattactcccaatatcgcacaaggtgtacacccctcctgtgatatggttcctaatatccatgggaggagatgatgatattactcccaatatcacaggggatgtacaccacccttgtgatattgttcctaatatccagggaagaaaacgatgatattattgtgaatattacagggagtgtacacactccctgtgatattgtttttgatatacagggtgggagaggatgatattactcccaatatcacataaggtgtacaccccccgtgatattgttctaaatatttcggtggggagaaaatgatattagtctccatatcacagggggtgtgtgctcctcaggtgatattgtttttaatatcaagagggggaggagattatattactttcattatcacagggggtgtacacccctcctgtgatattgttccttatatccaggcgaggggaaaataatattactctcaatatcgcaggaggtgtacacaccccatgtgatattgttcctaatattaagggggaaagaagataatattactttcaatatcacagggtttgtactcctttcttgtgatatagtttttagtatccagggggaaagagcatgatattactcccattgtagcaaggggtgtacacacctcctgtgatattgttcctaatatccagaagtggtgaggatgatattactcccaatatcgcagggggtatacaccccacctatgatattatttctaatatccatgggaaaagagtatgatattacacccaatgtcgcagagggtgtgtatttttcctgtgatattgtttctaatattcaggcggggagaagatgatattactctcaatatagcagaaattgtacatccccgctgtgatattcttcataataatcagggaaaaagaggatgatattactaccaatattgcaggggggttacacttcccctatggtagtgttcctaatatccaggaagaaagaggatgatattaatcccattatccaggaagtgtacacccaccctgtcatgttgttcctaatatccagcagggaagaggatgatattacaccccccccccgtgatattctccttaatatccaggaggggagaggctgatattactggatatatagcaggggtgttcataccttctgtgatattgttcctaatatccagaaaaggagaggatgatattacttccaatatcgcagaaggtgtacacctccctgtgatattgatcctgacattcagaaggggagaggatgatattactcaaaataccgcagggcatgtgcattcccttgtgatattgttcctaatacccagaagggaacaggataatattactttcaatatcgcagggagtgcacacccccctttggtatggttcttaatatccagaaggaaagagggtgctattactttccatattgcaaggggtgtacaccccactgtggtatggttcataatatccaggcagggagagggtgctattactccccacagtgcggggcatgtacaccctgctgcggtacggttcctaatatccagggggagagaggatgctatgactccctatatcgcggggtgtgtacacccctgtgtggtatgttttgtattctccaggaacggagagggtgttgttacccctcatatcgctggaaatgtacactcccctgtggtatggttcgtaatatccaggggattgagggtactgttacccccatactccccatatcgtggggggagtgcacctccctgtggtatggttcgaaatatccagggtaagagagggtgctattattccccattttgcaggaggcgtacacccccctatggtatggttcgtaatatccggggtgaggggatgctatcaaaagaagagagaaagagaccccccatattgttctatattattttatactcagtacctgttttaagaagaaacaaggaagtgaaaccaaaagcaggcagcccggcgccaggcaccagacccaaaaccagacccgaaaccaggcctgggcctgcctgaccttagcctgatagttaaaattcaacccatgacctagcaaccaatgttatccatagattccagacattgtatggaaggacattgtgaaatttcttgttctgtgctgtttcactctgattaccggtgcctgcagcccctgtcacatacccactagattgctcaatcaatcatggccctttcatgtaagatctttagtgttgtgagcccttaaaaaggacagaaattgtgcactcaacaagctcggattttgagacgctagtctttcgatgcttccagctgattaaaagccacttccttcactacctcggtgtctgtggggttttgtccgcgactcctcctgctacactatgactccccatatcaaggggggtgtacacccccctgtggttcgtaatatccagcaggggaaaaggtgctattactccccatattgcagggagtgtacacccccttgtagtatggatcgtaaaatcaaggggggagggaaggtgtaattatccccatatctcagggggtgtacacccctttgtggtaaagtttgtaatatccagggatattacagggatattatccccaaattaatacttttataatttcttatgcctgcctttactgcaatctctgaacataaattgtgaagatttcatggacatttatcacttccccaatcaatacttttataatttcctatgcctgtctttactttaatctcttaatctcatcatctttgtgagctgaggatgtatgtcgcctcaggaccctgtgatgattgcattaactccacaaattgtttataaaacatgtgtatttgaacaatatgaaatctgggcaccctgaaaaagaacaggataagagcgatgttcagcgaacaagggagataagcataaggtctgactgcctgtggggctgggcagaacagagtcacatttttcttattgcagaaaatgagtaggagaaatatcactgggaagggaacgcattcctaggggaggcctatggacggccgctctgggggtgtatcccttatgtggttgaagataagggatgaaatacaccctggtcccctgcagtgccctcaggcttgctaggattagaaattccagcctggcgaattctagtcagaccagttctctgctcttgaaccccgtttcctgttaagatgtttatcaatgacaatgcgtgcacagcaggacatggaacctcaatagtaattccattttctccctggccttgtgaccttgctaggcccttctgcccttgtgatcttttattgccatttgaagcatgtgatctctgtgacccactccctattcgtatccccctccccttttgaagtccctaataaaaacttgctggttttgcagatcaggtggtcatcacagaacctgccgatatgtgatgtcaccccggaggctcagctgtaaaatttctctttcgtactctttcactttatttctcagaccaggtgacacttaaggaaaatagaaaagaacctactttgaaatattgggggctagttcccccaatagacattgttcctaatatccagaaaaaaagaagatgatattactcccaatatcacaggggttgtgaaccccacctgtgatatggttcctaatatccaggaagggagagaatgatattactctccatattgcagggggtgtgcacatccctgtgatattgttcctaatatccaggggaggagagggtgatattactcccaatattgcaagggttgtaaactccaccctgtaatattgctcctaatatttaggatttagggggggagaggataatattactcccaatatcgcaggggatgtatatgccctctttgatattgttcctaatatccagggggggagaggataatattactttccatatcacaaagagtgttcacccccctgtgatattgttcctaatatccaaaaaggaagaggatgatatcaatcccaatatcacaggaagtgtacaccccccccttttatattgtttctaatatccaggggaaatgagggtgatatttctctcaatatagcagaatgggtacactccccctgggatattattcctaatatccaggggaaaaaaagaggttgatattcttcccagtatagcagggaatgaatacaccctttgtgatattgcttctaatatcaaggggaaaagaggatgatatgactcccaatatcacaggggatgtaaacctgtggcgttgttgctaatatcaaggagggaagagtatgatattactcctaatgtcgccgaaggtgcacactttccctgtgatattgttcctaatatccaaaagggaagagaatgatattacccccagtattgcagggtgtacaccacccctgtgatattgctcctaatacccaggaaaaaagagaatgctattacccccaatatctaaggggacgtataccttccctgtgatattgtttctaatatccaagtggggagaggatggttttactctcaatattgcagggagtgtacactccccctgtgatactgtttctaatactcgggctgggagaaatagtattactcccaatatcgcagtgatattgtttccctgtgatattgtttctaatatctagtgggggagataattatattactaccccatacacaggggagggtgtacattcccctgtgatattgtttgtaatatccagggaaggagaggatgttactcccaatatcacaggggttgtacaccccttttttgatattgttcctaatatctggggggcagagaattatattactgtcaatatcacagagtgtgtacaccccctctgttatattactctttatattcagggcggtagaggatgatattactccctatatcacagggggtgttcacccctcctgtgatattgtttataatatctaaggggaaagaggatgatatcactctcaatatcaaaggaaatgtacacctttcctgtgatattgtttttattatataggggggcagaggatgatattaagaacaataccacaggggatgtacacccacgtattgatattgtccctaatatgtatggggaaagaggacagtgtaactcccgatatcgcagagtgtgtacacccccttgtgatattgtttctgatatacacggggagaaaagataatatttcttccaaaattgcagggggtgtacaaccccctgtgatattgtttttaatatccagtgggggagagaatattactcccaatattgcagggcgtgtacacaacccctgtgatattgttcctaatatccagagtaggggaggatgacattactttcaatatcgcaaggggtgtacattcccctgtgatattgctcctaatatccatgaggggagaggatgatattattcctaatatggcaggggctgtacaccttccctgtgatattgtttctaacatccagtgggggagaaaatgatattactccctatatcacagaaggtgtacactttccctgtgatattgttcctaatatccagaaggggagaggataatattactcccaatatcgcaggaagcttacaactcccctgtgatattgtttctaatatccagggaggtagggatgatattactcccaatatcgcaggggatgtacactcccccgtgacattgtttctaataaccagggggtgagaggatgatattacgcttaataccgaagggggtgtacacacccttgtgatattgtgcctaatagccagggggaagaaaattatattaattttaatatttatggggaaaaaggatgatattactcccaatatcacaggggctgtacaccgaccttttgatattgtttttaatatccagaagagaagaggataatattgctcccaatatcagaaaaggtgtaaaccccttctgtgatattggtcctaatatccagggagggagagaataatattactaccaatatcacagaaggtgcccacccccaaggtgatattgctcctaatatccaaagataatagggtgatgttactcccaatatcacaggaggtgttcacaccccttgtgatattgtttctaacgtacagggaagggagaggatgatattattcccaatatcacaggaggtgtatactcctctgtgatattgattttaatattcggggggaaaggatgatattactccctatatcgcagagggtgtacaccctctgtaatattgatcctaatatccagggcgggataggatgatattactcccaatatcgcagaaagtctacacaacccccagtaatattgtttttactatccagggggaagaggatgacattactcccaatttcacagagtgtgtacactcaccatttgatattgtttctaatatctagggggagagaatatattactcccaatatcacaggaattgtacaccacctctgtgacattcttgtgaatatccggggaaaaagagaataatattactcccaatattgcagagcgtgtacacccctccatgatatcgatactaatatttttttaaagaggatgatattactcccattgtcacaggatgtgtacaccccccttgtgaaattgttcataatattctggggggagagcataatattactccccatatcgaaaaaggtgtccaccctccttataatatggttcctaatatccaggatattacttaatccaggatacttgtaataccctaaatatacaattgcttgaacctccacctcccaggttcaagcaattcttctgcctcagcctcccgagtagctgggactacaggggcacaccaccacacccagctaatttttttttcttgtatttttagtagagatggggttttgccatattggccaggctggtctcaaactcctgaccttgtgatctgcccacctcagcctcccaaagtgctgggattataggcgtgacccaccgtgccaagccaggaagaggatgctctatagatttccccaataagagatggctttgcagggccattccaaaatatgtcaaagaaatacatttggggataaaatactttgatttcctttagggaatgttatctattatgtgatgctataccagagtcaggttggagtcggttatcttattgcaacaaagagtctgttccgtcactgttgggatctctattttttcctcttatttcttgagacagggtctcactctgtcacccagtctggagtgcagtggtgcgatcttcattcactgaaacctctgcctcctgtgttcaggtgattctcgtgcctcagccccttaagtaactaggattacaggtgtgcgccaccacacccagctaatttttgtattttcagtagagatggtattttgccctgttggccaggctggtcttgaactcctggcctcgtgtcatctgcccacctcgacctcccaaagtgctgggactgcaaatgtgagctattgtgcccagccaggatctctgttttaatgttagtgctggtcactttgcatgaactccaaagggaagaaatataatgaggtgtgtctgaccccctgccttctcatcgtgacctgaattagtttttcaggtttgcaggggatacccttggacaagaaggggctctattcggttggttggggggattagaattttactttttgtttacaatatttctcctgaaagagttaggggctcacaaggaatttccgcgtgagcaacttatgaggaaagccatctgggaagatatgtgtccttgtgtcactgggatattctcgtttaccccaatgatacggcaatgacgcagggttgtgaaattacagctatgtgtttggggaaaaaagaaagcaggattgtgtgactacgtttccaaacttcacttgcccttagccatagtgagttgggggcctggagattctgttttctttcacaatgatatagatacaattaaatgtatagaaagcaaaaaaataaaaaggtgagtaatgaggaacctctgattcctgagtggccatgtagttacccatggcacagagccacagttactgaaggtaaagtttgctggggaatttagaaatgaatccagctcttggaggagtcagtttactggatgcctaagaaaatgcaaacaaaataagaaaaaagggtaatattcaatcccatagttattgttacctgtcatagctaaagtaaaattaaaacagagtgctggcttcaatcttgatgctacactaagcttagatttcagtgaatgtgagtctcagccactagctcagagccacctcccaaagaccaaatcatgtagggacaatagaaagtacttctgagaattgtggttaccaagaacctagtaactgttggggaggagcaaaacaaagtacagaaaccagagggtacaatctgagtgagactgctatcagcttctggaggagcctttactaaaatgaatgatgagagtaactggatgatgagagtaactaatggatgatgagagtaagcaatgtctttggttttcttttttttttttttttttttttagcagacgtctcactcttgtcgcccaggctggagtgtaatggcatgatctcgcctcactgcaacctccacctcctgggttcaagcaattctcctgtctcagcctcccgagtagctgggactacaggcactcatcaccacacctggctaatttttgtatttttagtattttctggtgagggtccaggtttccggaaacaactcagagacatatgttaagatgttatctttagttttcacagggaaccaaatatgttacgactccaatttccttggctattgttttaagttaccattaccttctcgttgatcaagttgctcatttacttctcaagcctagctagatgcctggaatttcccttgaaggaagtcaagattttcctttatctccatactggctgatggtgatcgagtaagcccctaagaggggtccctgctccatctcgagatgctgctagattctacagtgcctaataaacagctctcgcctggccgacaaagagctgcttgctctctggatagcaattccaaagtgaacagacaacatcctgtttggaagactgccactctgttagaagaagcatcaggaaaacctttcttttgagctatttataactaacagcaattgaccaagtatacttttgtgagtgaaactgacctttctccctgtaagaattctccaaaatttggaaactatttgtgagtatttttacttatggcaatataattattggcacaagctcaatcagattcggttttctttcgtaacaggaaccattggagatactcattactctttgaaggcttacagtggaatgaattcaaatacgacttatttgaggaattgaagttgactttatggagctgataagaatcttcttggagaaaaaaagactgggtatattttcaatatgctttccttttaaggtccctcacctgtggaaagtaaagaatgtcactttctgacaggctcaggaacctcaagttatgtagggatctcaagaagatgggggaattcacccagttcatacaggtgaaattgctgttgcaaagattatgaatatgagagaagtccagcatggctgacttcatctcgtgtctggcctcaggctggctgcccttgctcactcttgggcataggccaagctagccatgggaggaatttagtttatagtttaactttgaagcacggatgataatagtctctccctaaaatgaaccccttccttgctcagggactgaaactacctttgtatgacaaatgaaagcccacaagattaagattatgagaggggcctgaattctgctaaaatgcaggtgtagctgactgataacaagtcattgtcccacagcttgcctttctataatctcttgcttctcaggagtcacatggccagaggtcctgagatttccagtcctgtgacccccacccagagatggacttagtgcatgaggaccattttccacacccctatgatttcatcctcaaacaatcagcagcaaccattccctagccccctgccttccaaattatccataaaaatcctagcctctgagttattagggagattgattaataatcccagtcctaccccttgggttgctctgatttaattaaaccttctctactgcaataccacggactcagtaaattggttttgtctgtgcaatgggcaagaagaacatgttgcatggttatacaggtactacaagcacagtctgatggcaaattattggttttgcttcctgcccttgatgtttctaaacatctagtccaaaattacttgtgaaaggtccagcaaagccaattttaaaagaggctatatggccaatcactattctttctacacattattgcaaataatcaggccacggctgggcacggtggctcatgcctgcaatcccagcactttgggaggctgaggcaggatcacctgaaatcaggagttcaagaccagcctaggcaacatgataaaaccctgtctctactaaaaatacaaaattagccaggcatggtggcatgcacctgtaatcccagctacttgggagactgagggaggagaatcacttgaacctgggaggcagagattgcagtgagctgagatcacaccactgcactccagcctgggcaatagagtgagactttgtctcaaataataataataataatcagaccaagtataatgaaattaaaatttattttgcaaataaattggtcctactacaatttatccttcatagaaatgtggaaactgaagataaaaaaaattaggtttcagaagaaaactatactacacctgttattagattctagccctaaacattgtttttgaggtttttattatttacctgcaatttggtctaaattctgaattatttcctgactacaagtatccaaggaataaatgggttttctttttctttatgatagttttagttggcttctaatgcaacaacaatttttattgtaatcctgtgtgcattctattcctactattcaaattattaatgttatagatctttcattgtagtacttctgaattaaccaaaatcacagtattctgaagatgattctacaaagcctgctgtttctacaaaggctgctgatgatttctacaaagcctgctgtagtgttgctgtggcctctgcttaaaaaagtagaaaacacattgatgcagcatgttcaccccaacctccctgcctaaaggctcagggaccatcttggaagaggaaggcgcgtgagattgtaagagccgaattagggggatggagtgtggagaataaggacacttcatcttggatgctcacctgccaaattgacttctgatgaaagccagctccagaaatgtgcctacagttactactttcacctaaaccctgcccttagtcaaatccttctcttcttctaagcaatcaacttcaattccttgtataacccacagtataaaagggcttttataccattctatcctattgcatgtaagccttgggtctgggaggtaacagtgtgggattccaccatctcatctccctgccacccaaacatgcctgctcttctttaagcaatattaaatgtttgtacttcagaaatttgatttgtcagcctcttcttcagactctcagcttctttggcctttgggagtaaatttgcataggcctgctcaaaacaggatgttctgggggtttgggggtgttgttttgttttgttttttgttttgtttagagacagggtctcactctgtcacccaggttggagtgcagtggtgcaatcatggcacactgcagcctcaaactcctaggctcaagcaatccccccaccttggcctcccaaagttctgggattacaagcataagccaccatgcccagccctggacttttctttaaagacatttacacagtgtaggaattactgtgggtgcactgctcaggtccccttctccaggatgctcattcctacctcatagatgattttcctgcagagatttgacctcagctgaagggcagtcacctggtccaggtggttgctattcacctccttcctgagaacagccaacagccagggacacgctagcacagagatataagagcgaccaaggtgaggccccttctgtgctgcggtgcatgctccagagcctccctgggatcagacttaagagggtctccagccagatctggtcttcgctgctttcctcgagctccccagcgcactcctgcaatgcatcttttttttttttttttttttttttgagacggagtttcactcttgttgcccaggctggaatgcaatggcgcaatctcagctcaccacaacctctgcctcgcgggttcaagtgattctccttcctcagcctcccaagtacctgggattacaggcatgcaccaccacgcccagctaattttgtatttttagtagaaacgggtttctccatgttggtcaggctggtttcgaactcctgacctcagttgatcctcctgcctcagccttccaaagtgctgggattacaggtgtgagccactgtgcctggcccaatgcacctcttgaatcacctcctcatgctttgcttttagagaacatgatccccaacatgtgattccagcaaagattctagaaagccaaccgtgacaatcacttctgggtttagatgacccccccccaccacaagatggcagtgagcacctcatcacagaggtgctgatggtctgcagcaccgcgccaggccagaacgtgccttttacagaagaaaataacccagtagctgactaggatggtgaggagggctggtgagcactgcggtagtgagagggacactagcatcactgagatgcaagtgatggtcatttttcataggtcaaagctcaaagcaggggacagttacagggcagggcttcatagcaccagtgtgatgaaagtatctgggagtggctaaggccagcactatgccatgggaagcaaggtgggcctgaggaggaggcagcagcgtcagcctgcaacaagtgggggctgccctgcagagacctaagagtcatgttatagagcacagtgtctgtaaggccaagaagtgtggacagccaagtgtgtcaattactagacatactcaagaggagcaggaagggcagggcatggtggctcatgcctgtaatcccagctacttgggagactgaggaaggagaatcgcttgaacccgggaggtgaaaattgcaatgagccgagatttcgccactgcactccagcctgtgtgatgggagcgggactccatctcaaaacaaaaaaagaaaaaggaaaaagaaaaaaagaaaaacctaggtatacttctcaagcaaataaaaataatcaaaaccaatatcatgcccgggcacaaatttcatatatataacagatttaaatatatgagggtgattatcctctcatatctccatttttttttgtttttccatttttttctttactaaaaaaagttaatgccaatgacacacaatttttttttttttttttttttttgagatggagtctcacttcttcgccctggctggagtgcaatggcgtgatctcgactcactgcaaagtctgcctcctgggttcaagcaattctcctgcctcagcctcccaagtagctgggaccacaggagtgagccaccacacccagctaatttttgtatttttaatagagacggggtttcaccatattggccaggctggtctcaaactcctgatctcaaataatctgcccgcctcggcctcccaagattctgggattataggcgttgagccactgcgccccgcctatgtatgattttttttttaattttattttcataagtttttggggaacaggtggtattttgttacatgagtaatttctttagttgtgatttgtgagattttggttcacccatcaactgagaagtatacactgaacccaatttgtggtcttttatccctcacccccttcccaccctttcccccggagtccctgaagtccattgtatcattcttatgcctttgcatcttcatagcttagctcttgaacccttactttctgtttgagggagaagacatatcatctacaagtagatactgtgtaaacattccattgcatgactatcccataacttatttattatttgtgtttggttatttgctgctatgtaacaaccccactcccaactaaatggtgtgacaattccatgattctgtggatcaaaaattctgaaaagtcaaacccaaggagttttgtctctgctccatgatgctaaagcctccgcaggggtgaggcgaatggctcagggtgactgaaaagctcagggttggaacagctggggatgaggcctctatgtataagatgattcttcactcacaggtctgaaactatggtggggacagccagaaggctcggctcagctgggacagtcacctgagccctacacatgacctctccaacatggtgatcctgaagcagttgggtttcttacacagcatcacacttttcttttttttttttttttttgagatgaaatattgctctatcacccaggctggagtgcagtggcacgatctcagctcactgcagcctccgcctaccaggttcaagcgattctcctgctccagcctcccaagttgctgggattgcaggcgcctgccaccaagcccagctaatttttgtatttttagtagagacggggtttcaccttgttggccaggctagtcttgacctcttgacctcaggcgatccgcctgcctcggcctcccaaagtgctgggattacaggcatgagccaccgcgcccggccaaagctcacacttcttatgattcagccttagatgtcacatcagttcattttccccacacttattagtgttagaagtcacaagcccacccatactcaggggactggcacacagaccccactctcaatggaaggggtgggacaccaccattcctgctgatgggcatttgggtaacttcctgtttgaagctattaagattgggctgctgtggccgggcgcagtggctcacgcctctaatcccagcactttgggaggccgaggcgggcggatcacgaagtcaggagatcgagaccatcctggctaacacggtgaaaccccgtctttactaaaaataccaaaaaaaaaaaaaattagctgggcatggtagcgggcgcctgtagtcccagctactcgggaggctgaggcaggagaacggcgtgaacccgggaggcggagcttgcagtgagccgagattgtgccactgcactccagcctaggcgacagagcaagactccgtctccaaaaaaaaaaaaaaagattgggctgctgtgactattctagtaggtgtctttggtgagcgcctacacgtgtttctctttttctctttagtatatgcccaggaggggaactgctggctcccagataccgtatgttcagggtcacacacacttccacagggttttccaaagcccttgtaccagcacgcactcccagcacctgtgtgactgctccagctgtcccacagtctcatcagttctattgctgatattttcattttagcttaagttatatttaataggaaaattaccgttgcctctgccccccgttcctgcctgtaggagtttctcgtagctgttgctacaggtggccacaaatctgtcacttaaacccacacaaattgatgtccttatggctttggagtcagaagtgtcaactgaaggtactagcagggctgtactgacctggtggcctcagggagcatctgtgctgcttctccaccttctagaggctgctgcatccctcgctccagccccttcctgacaccactcaccctcctacttctgttatcacatcctcaccttctctgtgttcagggctccctctgtctctctcttgcaagcacacttgggattccattgagggccacccacataacccaggagaatttctccacctcaatatccttaacaactgcagagcccttttgccataaaagttaccattcacgggttccagggattgtgacatgggtagctttaggagtgattattcctgcctgtctcccgctcaccagaacttggactttctctctcaacaggagccccctgtgtgggaatagcctgtctcaacgacgccctctataaggacctgcttcctcaaaggacctcatagtcgggtcctgcccctcagtgtccagtctgccttggctggaggggctgcaggggtgtgttggcgccacctggtggagacagggcatcacagcaggtgggagcccagtagaagcacaaccaaaacatgggtaatgtttaaaattttctggctaagcgctgtggctcacgcctgtaattccagcactttgggaggccgaggtgggtggatcacatgaggacgggagtttgagaccagcctggccaacatggtgaaacatcccctctactaaaaaatacagaaaaattagctggacatgtggcgcgctcctgtaatcccagctactcgagaggctgagacacgagaatcgcttcaaccccggaggggttgccgagatcgcgccactgcactccaggctgggcgatagagcgagactctgtctcaaaaaaaaaaaaagaagaggggaggcgaggggaggggaggggaaaagggggaatttgtttggagctgagacatccatcttctcctgacctcagatatttgcactcctggttatgaagccttcacacttggactgaatacaccaccagctttcccgatttccagcgtgcaaatggcagatcgtgagacttctcagcttccataattacatgagccaatttatatatataaattgggtcctccagaaaaacagaataaattatatatataattatacgcataacttaattaaattatacgtataacttagctatatatataatttattctgtttttctgaagaaccctactgacacaaatgttgagcatcttttcatgtgcttattggcttaataacttgtacatcttctttggggaaatgtctattcaagttctttgcccattttgtaactgaactattaatatttgtctttacattgttgagttgtaaaagttccttatatattctagatactagagccttatcagatatatttctgcaactattttctcctaatatataggttgtgtttttattttctttttctttttttttttattgagacagtctcactctgtcacccaggctggagtgcagtggcatgatcttggctcactgcagactcgacctgccaggctcaagcaattctcccacttcagcctcctgagtagctgaggttataggcacttgccatcgcacccagctaatttttgtattttttagtagagccgaggtttcgccatgttgcctaggttggtcttgaactccctgcctcaaagcgatctgtcagcctcagtctccctaagtgctggaagtacaggtgtgagccacagtgcccggccatctattttcaatagtgttttttgatgtacacaggtttggaattttgataatgttcaattcatccatttttttttttttttttttggttctttctactggaccaccactcttgagccctctaatccaacctccacgcggcagccagagggagctctctaaatgtaattactctttccctgctccacctgctcaaaacagtgtcacatttgtgatttaaaacagtatttctcaaacctaatttgcaaacaaagcaggtggaactcttcttgtatgcacagcatctgatttggttggtctggcatgggtctgggagtgagcacacctaccaagcggctgctggggtaacttgcgttttccactgatgatttcagcaatgtttccggtcccacatgctcctccagaaccttgtactcccccatgaaaaggtggagtccatttccccttcctttatttatttttttgagacgaagtttcactcttgttgcccaggctggagcgcaatggcgtgatctcagctcaccgcaacctccgcctcctgggttcaagcaatgcttctacctcagcctcccgagtagctgggattacaggtatgtgccaccacgcccagctaattttgtatttttagtagagacggggtttctccatgtcggccaggctggtctcaaactcccgacctcaggtgatccgcccgcctcagcctcccaaagtgctgggattacaggcgggagccaccgcgcccggctatttccccttcctttgaacctgatcaggacttgacgatggcatcaacatggtgagagtgaccctgcatggcttatgaggctgggttacacaaggcgatgttgcttctgactggctccctctcaggatacatgcccttggaacccatcctctaagctccttgggagcccaacttagcccatgtggagacaagacagggagagaaacagaggcacccccagccctcagccagcatcaaccgccagacaggagagcaaatgcgccaacaatgattccagctgaagcctcagacagcgtggagcagagatgagggatccctgcagattgcagatgcgtgagcaaaatgcatgctgtcactgttttgaaacaacaatgtctgggggctgtttgttatgcagcaatagacagctgtaacaatgctgttactgctgtattccatgaatgactgcactttgagtagcagggggctagatcactagataagccccatggcttctgtgtatgctatttttctacttttatatccttttcattcactttttttttttttttttttgagacagagtctcactctgttgcccaggtgggagtgcagtggtgcaatcttggcggactgcaacctccacttcccgggttcaagcaattattgtgcctcagcctcctgagtagctgcgactatagatgcacccccatgcctggctagtttccgtatttttagtagagacggggttttgccatgttggccaggctgatctcagactcctgacctcaggtgatccacccaccttggcctcccaaagtgctgggattacaggcgtgaaccactgcacccagcctcattcactttctttacttggctcatttttccttgttgcctcaattctcctctaagatcactttcctgacatttcagcctgggcctgttgccttctctgggtcccctccgcctcctgtgcctcccccatctcagccttgatccctcagattatacttcctctgtccccaccctgaccatcttggctgtccctggatagggatgggtatcttctcccactggtctgggagatctggaaggacaggcctggaaaagacttggtcactgctggaaggagctcagttagtgtggtgctgaggacagtacgggtgaggctggccccttcacccaaactcccactctcttccatagatttcacctctgtggcccaggccataggattagggcaactccccttaaacatcgagtccatcctccaagctgtccttttttttttttttttttttttttttgagacagagtctcgctctgttgcccaggctggagtgcagtggcgcgatctcggctcactgcaagctccacctccagggttcactccattctcctgcctcagcctcccgagtagctgggactacaggagcctgccaccacacccggctaattttttgtatttttagttgagacggggtttcaccgtgttagtcaggatggtctcgatctcctgacctcgtgatccgcccgcctcggcctcccaaagtgctgggattacaggcgtgagccatcgcgcccggcctcatgctgttcttgaatagtgagcacctgttacaagtcgccccaccagcctctcacttgtacccccctcatctctttctccccaagagacagaggaccctggcacttgtgaagcatgacccagaccctggggccatggcatccaacatcctcattccccatgacccctactgtctagatgtagctgccaagagacccccagactccccgggcctctgtctagagtgccaagacagagagagaatgccctgccgcttgcatgctttgtggggtgtccttcccccttccctggctgctaggcgtgacttcaacgttctccccaacccccaaacagcagcactgacaccagctgcagacctggctcaggttagctaatgaggaccaggctggggatggagcctgaacccctaaaccccagtcctgtaccccaccctaatcctggggtctccactggacaaaacgaagcagcttggtttttcgttgttattgtttttgagatagagtatctctctgtctcccaggttggagtgcagtggcgtgatctcagctcactgcagcctccgcctcccgggttcaagtgattcttgtgccgcagcctccccagtagctgggattacaggcgcgtgccaccacacccagctaatttttgtatttttagtagagacagggtttcaccatgttggccaggctggtctgaaactcctgacctcaagtgatttcccagcctcggcctcccaaagtggaagcggcttatttttaaggagaaaactcccgtggaaaggaatcagcacctcctctgtcaacatttcacttctctgaaaagactctcacttccaacagaaagtgctttgtaacacaacaatgaggctgggcgaggtggctcatgcctgtaatcccagcactttgggaagctgaggcgagtggatcacgaggtcagaagttcgagaccagcctgaccaatatggtgaaaccccgtctctactaaaaatacaaaaattagttccgtgtggtggcgtgagcctgtaatcccagctactcaggaggctgaggcaggagaatggcttgaacccaggagatggaggttgcaatgagccgagatcacgccactgcactccagcctgggcaacagagtgagactccgtctcaaaaaaaaaaaaaaaagaatgagaacatatggacacagggaggggaacaatacacacaaacaaaatttagaaacaggtgaaaataattttagtaatatttttactaatactgatatgctcaaaatattattatttcaataagtaatctaaaaattattgagatgtcttatgttcttttcatcatactaagcctttaatatttggtgtgtattttacactcacagcacatctcaatttgcagtccccatgtttcaagcactaaataaccatgtgtgtccggtggctaccatactggacagcgttgatctgaaatcgcatctgtatgcatcaccagcatatttgcagagatccccatctcagcagcacacctgaggctcatctgcgaaagcacctgcaacttctctacaacctcccacatcacctccaaacacatcctcatgtcatctgcaaacacacccatagctcacaggccaatgcctaaatatcattgcaggcaccttcagagaaagcacttactaaaggggtatacttgattccacatctgctttgacctgcaaatctcccttctcctttacatacatttgcatctcatttgtatgtcaatctaaatccactggcagagcctcagatcatcatctcaaagtcaggtggatgtggggctgggcaggcctccaggtgttcctcctcctgcttcctctggggctcttgatcctcctcctcttccttgctgctctcctcctcctcctccaatatggtgaccagttcctcccgcagcgcccccatctccagccccaggctgcacagctgtcccagcagctggacatccactcggcgcaggttcccctgccagtaggaaggggacgtcacagggatgccaccccagagagcaaggggtctctccaggacctgggtgagagcaggtcccaactcatgtcctggccacagcgcctgggcagggtcctcactgtgcccatggaccctaactgccttcctgcttctcagagtgtctcttgatctctaactcttctctttgtctctccatttcattgtccctgacttctctctctctgtctcctccctctcttatctatatctgtccctgtttccctttgtctctgtccccatttattttttgtctttccatgcccctgtctctctgtctttatgtgttgccatttctctgcccctgcctttggctctctttctctcgcttgccctctctctgccctccccaactttctcaaattcagtctgtctctccatctctgttcctgctctccgtctctgcttcccacctctgtccctctcttttgggatctccctgtccccacctctgttcccgtccctcactctatgtctgtctctcggtgtctgtacatgcctctcatgtctctgcttctatctctcagattctgtttttcgatctctggccttctctatttttgttcatttccattcattctcatttcctctctttctctttcccttccaaacccctcactcaccagctcctccctgatccacagcagactatcgcaggcacctccagtgtctgcccctgcagtcctgagggtctgaccagggatttccactggggagacctccctcagggcctgggggggtgggcccagccccggaggcaccagtccagcctgattcagctgcctccacagttccatcgtctctgagctatggctgcaaggagcaggaagtagcaaggtccagggtggcctggtcccctggggagctgtgtgcgtggtggagagtaaagggcagagggagtgggatgggggttcctgggaaaggtatcccaaagtccactcttcagagagaatcagctggccttgtgcttttctttttccttctgaagtctaacctcaactctgctcacagggttcaaacatagcctcttgcagaggtctaactccacccttccctgcctgtctcaggcctgacccctcaggggcgctcagtgtctgtagatgcctggcaccctctgtccttccacctgccccccaccaccacttctccagcctctcctcagcctccatttgacctctggcttgcccatagcttggtccttgcttgtcctcttggcacgggtcatcctagggctttcccaccagtgtgcctttgggggcaggaatggctcccaggggcaccaagacagcaatcccttagctggagtgcctgtgtccaggctgctggcctagggccaagcagccaattctgctgaccctggacttgcctatgggtatattatccctgttgagggtgagggcttctgctgtggaaaagtctgggaagcactgcaggcctctctcggccttggacccttccttcagacccaaggtgcatatatatacatatatataatggtagatcacgaggtcaggagatcaagaccatcctggccacatggtgaaaccccgtctctagtaaaacacaaaaaattagccgggcatgctgccgcgtgcctgtagtcccagctactcgggaggctgaggcaggagaatggtgtgaacccaggaggtggaggttgcagtaagccaagatcacgccactgcattccagcctggcgacagagcaagactccatcttaaaataaacaaatgaacaatatatatatatatgtattttgttttttgagacagagtctcgctctgtcatccaggctggactgcagtggtgcaatcttggctcactgcaacctccgcctcccgggttcaagcgattcccctgcctcagcctcctgaacagctggggttacaggtgcacgccaccacacctggcgaatttttgtatgtttagtggagacggggtttcaccatgttagccaggctggtctcaaacccctgacctcaggtgatctgcccacctcggcctcccaaagtgctgggattacaggcgtgagccaacgcgcccagccccaagtcccttttaccatagaaagtaacatagtcacagtgcccagggattcacaggtatggggagagggttcgttattcagctgccacacccaccttcctaaacctgctgcccttccagtttcctcacgtgcacagccacgcccgtctgcttttagtttctcaatctgttggcttaaccttcaaaacaggcccaggatttgagcacttctcaccattccctctgccccatccccattcatctcttgcctagactgctacagcagcctcttttactggtcccctgcatccacccttgccctctaaggcaagggtccccagtccctgggccaaggaccagtaccagcccctcgcctgctaggaactgggccgcacagcaagagatgagcagcgggtaagtgagcattaccgcctgagctccgcctcctgtcacatcagcagtggcattagattctcataggaggcaaaccctattgtgaactgtgcgtgcgggggatctaggttgcctgctccttatgagaatctaatgcctgatgatctcaggtggaacagtttcatcccaaaaccatccccaccccacccccgacccccagtctatggaaaaattgtcctccacgaaaccagtccctggtaacaaaacggttagggaccgctgctctaaggtacattctccacctggcagaaataatctttacaaaatgtaaatccgattttgacactcccttcttcccactgtgaatagaataaaaccctaccaggcctgcaccgtcagcccctgcccacctctcaacccagtctcctatctctgtctgcaagctggttcccacctcaaggcctctctgctctagaggctacctctccctgcagcgcttttcccctagatctttgaatggctctttccttatcattcacttctacttcaatgtcacctcttcagagaggcctttgctgatggccctacacccagtcacttttttttatctgcttctcatcaaaattgccttgctgattcctttgtttcttattcatcctctcccacatccatcctctcccagcccagaatgttgacttcctgagagagggactgggtctgtcctgctcaccatggtaacctcggcatctagaacagtgcctgccatcacgtggtaggtgctcagtaaatattcttggaactaatgaatgaataattctatccacaagacttcacaatggctcttcatgctgcgatctagctttcaactccaaactggtcttgagatctcacctcagtctctaaccttgacatctaacctcttcacccactctcttacctgaccctaatttttaaaaatgacgtggtcagcttttcagccccctcattccctgtttttaggaggtagtgagtggaagctggaagaataagaaagcttggggagactgcaattgcagtcaggaaagaaaggtactctgccgggaagaacaccccatcttctcctagggaaagattgtggagtcctggggtttgttttgtttttcaattttttgttttaagagacagcgtctcgctctgtcacccaggctggagtgcagtggcgcaatcacagctcactgcaacttcgacctccccggctcaagtgatccccccgcctcagcctcgtgagtagctgggaccacaggcgtgcaccaccacgcccggctaacattttattttttgtggatataaggttgccctatttctttgtggagataaaggctcccctatgttgcccaggctggtctcgaactcctggcttcaagcgatgctttcgcctcggcctccacaaagtgctgggttcacaggtgcgtgagcccgacctgtgtctcgttttgaagctcagggagagggcgctgtgagcaatccctaaaccctttaagagtaaaaagtgcgtgcacctttaagaggacggttagaaaacgcggggcgtggccacaggagaataagttcgcgctgaaccaggagcgtgggataagaccggccccttccggttacgaaaccttagcaagatggcggctccctgggcgtccctgcgcctggtcgcccccatgtggaatgggcgtatcaggggcatccatcgcctgggtgcggcagtggccccagagggcaatcagaagaagaaaaggacaatactccagttcctgaccaactatttctacgatgtggaggctctgagggattacttgctccaaagggagatgtacaaggtgcatgagaaaaatcggtttcgagacaaggagtggatcaggccagataagtatggccatttctctcaggagttctggaatttctgtgaagtgcctgtcgaagctgtggatgccggtgactgtgacatcaactacgagggcctggataacctcctccgcctgaaggagctccagtccttgtcgctgcagcgctgctgccacgtggacgactggtgtctcagccgcctctacccactggccgactcgttgcaggagctctcgctggccggttgcccccgcatctccgaacggggcctcgcctgcctccaccacctccagaacctccgcaggctggacatctcggacctccctgccgtgtccaaccctggcctcactcagatattggtggaggagatgctgcccaattgcgaggttgtgggagtcgactgggctgagggcctgaagtcagggccggaggagcagcctcgggacacagccagccctgtccctgcctagcctttagccctgtccccactcacgtggcttctcagcgggctgcatggaatgtctggtagctcaccacacttctggcttccatttgtcttcactcaacgtcagggtgggggagtggtgctggccaatcacaggagagagcgtgagttcccagtatttattcctggctgcccttggctaaaggtcacagctcctgtcaccctgtcaggcagccctttccatgcccctgttcaggcctggggaggtaaaggctcaggctgttagtagccgcagagagccacactcaccttgtcaggagactcttctcaaactgtccttatgtgagtgcactgccatttcttgcagggaccctgactgacacaggggctactactgacactttacagggatggttctcccccgtgcagggccgctgtgcccactgcaggacatgcagcatccttcgccccactccactcactaaaggccagcgcaccccaggccccatagtattgctggttatggatttattgactttatgttccaaattcagctttttcagttggctgttttttgaaaggggataagctttgtcagtagagggcaccgaacaggcattataggaggaaaggcgcctccttcgtggttcttgttggcctccactgaggcacctctctgggaataacgttccccagcaccccaaatggatttccagtcaattcagaagcattttaccagtgaagccctcattattccagttcactgttaaagccagtaattctctatattaaactttccctgttcggtttatactccggagtataaaccgaacaggggtggccaagctgctgtgggccgccgccgtgcagaaccgctggaactcacgcttggggcgacggctacagttggattttgcccctgcaggcaggttcggtgtcgatactggcgttgatagcgctgctgccgtttgacgtggcgaatatgggcttgtttctcggcctgatcgccgtgttgtcgtagttcgcagccacccagga

SEQ ID NO: 735324 - DNA, 188297 bp, Homo sapiens
ctccaaggctgagggatgaggagacctgctgaggacccagggccttatctttccatcccactccataggtcccagtattgactgatgctgtcttcacctcctagcctcacttttaaccttctggcacccgcccaccactgtccagttcactattgaagccctgccgtccagtgctgcagagggaaaggatgttcttctactggcctgcaatatttcagaaactattcaagcctattattggcacaaggggaaaacggcagaagggagccctctcattgctggttatataacagacattcaagcaaatatcccaggggccgcatacagtggtcgagagacagtataccccaatggatccctgctgttccaaaacatcaccctggaggacgcaggatcctacaccctacgaaccataaatgccagttacgactctgaccaagcaactggccagctccacgtacaccgtgagtgattcccccatacctctgggtgctggcggtcagttctgcttcacacacatgagattgtcaggcctgggctgtgcctgcatccccctctgcattttgtcccgtgttgagatttgggcatttagtgcaggacacacacatggtaggtaaacttcaacagatcagaattcctttcctgcatccaggccctgcagacactgatggcgggggcgggggggcctcagcagggggaggtcagtctcagccaagcaccccatgccctccccatgaacctgaccctgagaaagaccctggagaactgggtcagggcctggcctgagggcgtcctgggaacctcacaaaagcccagcctcaggactcctgactccgtgtgaccccgggaagcctgtgtcagggctggggtgtggtctcctgggcagggcttactgggagcaaggatttaccagatgtctgcgggctgtggttcctgaagcttctcatcagtgagggctcagctcccagagtctcatctagacaaggacagagcctaccactttccctgggactcagcctggagagggcagggggacaggattactagggcattggccccctgaatgaggagcttaagagatgcccttgggcagtcagtggcccaggggtaggaacagaggggagaaaatgttcctggcagcttcttgtccaccggggatcatgcccaggggtgctctcccatggaggcaaataacagatgctgttgatgtgaacacctcctctgtgccaagcttcatgtcagatcctgtgaataatttaaagttcattcacagacaaagtggcaagcctcagaccattttccatttacatattgtatggaggggaaactgaggcacagagagatacagacaccggccacggtgggcagatcgcagctggcagagtcacatgagggctgtctgcagctgctgccacgtcctctccttcatccctggtgccttactaggtgtctgtggaccttagaacagccactggttcggatgttttcttcttaggtgtctacagctcggagggggagattctggtctggagagttatgagtaaatacagaattaatcagttttttcttaactaaatcacctgcctcaacaatcagtcagtgctggggaagttcaggcctcctcgctcaggtccacaccccgcatctctggacatgaaatggcttcgtgtgttttctgatgtgtgggtatcattccaacaggaggataaaggggaggactttgctttctctccccattcacaccctgcaccagccagggcccagtgtgagacacatactccgtagttctctcatgaaggagggagggaatgaatgaaggaatgatctataacctcttcagagacagagacctggatacaagatcctaggaggttctgggcccaacgtgagacacacactctgtagttctcttatgaaggagggagggattgaatgtaggaatgatctataacctcttcagagacagagatgtggatacaagatcctaggaggttctggccacacctgttttctgtccctctagagcctaagacccatgtctcattcatctggcccgtttctcctaaatctgcccctgggagctgagtctcatctgaccctggggctgcagggctgtgggaaggttttcaggggagggatcaggcttgcgggtagtcccacacgtttgccttacaccctggagctctacctggttctcactatgaatatcccataataatcccccctatcctttctggggagtagaaaaaaagtaaatatttaaaaatatgccagagcatctgttcttcttagcaagttcagatagttattagttagcaggaataaatcgttattttaccagagcctcacctgctgggggtttatgggagcctaactgactgaggggggtgggaaatatccaactccagccccctctagccatcatgtcccacctaaaggagagaaaaaactgagaggcacttgtgacattcacagcccagggcacagactctatccaggaccacagaacccctccctccccccactcaccaccgcatcactgaacgcctgctcacccaagttcctgttgcccagtacatcatgtcctggctttcaacaaaaactacaagacagactagaggcaaaaaaaaaaaaaaaaaaaatgcagttcgaaagacagaacaagcatcagaaccagatgcagatgtggcagggatgtggcagggatgttgaaattatcagaccaggaatttaaaacaactctggggccaggagcggtggctcatgcctgtaatcccagcatttgggaggccgaggcaggcagatcacctgaggtcaggagttcgataccagcctggccaacatggcaaaaccccgtctctactaaaaatacaaaaaattaggcaggcatggtggtgggtgcctgtaatcctagatactcggaaggctgaggcaggagaattgcttgaacctgtgaagcggaggttgcggtgagcctagattgtgccactgcactccagcctgggcaacagagcgagattccatctctaaaacaaacaaacaaaaaacaatactggctaatatgctaaaggctgcaatggaaagcatagacaatgtgcagaacagacggatgctgtgagcagagagatggacaggctaagaaagaataacaacagctactatatctatctatctatctatctatctatctatctatctatctatctatctatatatatgtatatatatgctagagatcaaactcactgtaacacctggatctcagagtggttgtgaggatgtttattaggagattaaagagattaaagcagagttatacacagggcgagagctcaactgatgctatcaactagtattcttatttttttgatgttgttattggcaataaaatcaggaacaatgcagtaaaaatttggttttatcatgtacgagttctgtgaccttccttgacttactgaggtactgtaagtctcagattctaactctgcagatggcggtgatgcccctctccctcaaggtgatgtgaggatgagatgagctgtaggtaggttggtgcccactgtgcctggcacatggaaggcccctgaaaatagtcaatgaacatcatccccgctcatcagcatggagttgacagtgagggctcgctctctgtgacaatcatggaatggaaaagaagaaacaagaggaagactgggcgcagtggctcatgcctgtaatcccagcactttgggaggccgaggcgggcagatcatctgaggtcaggagttcaagaccagcctggacaacatggcgaaatttcatctctactaaaaatataaaaattagcctggcatggtggcacaaacctgtaatcccagctacttgggaggctgaggcaagagaatcgcttgaacttgggagatggaggttgcagtgagccgagattgcgtcagtgcactccagtctgggtgacagagcaagactccatccaaaaaaaaaagaaaaagaaaaaagcaacagagggaagaggtgtgacatgagaggaagaagggatttaaaggtacaggagcagggcgaggtgcaagcacctgtgggagaatgtaggagttggtacatcccagtgtgtcaagtctgagacacagaaaatggtgcaaccgtggagagcaagggagtcagctatgaggacagcccaacagaccacactcaggctctggagcatttccttcctccctgactatgcccctgccctgcaatgccccttatggtttcccttggaacaaacttgggccttgtcccctttgccttcccctttctgcagaaaacaacgtcccaggccttcctgtgggggccgtcgctggcatcgtgactggggtcctggttggggtggctctggtggccgccctggtgtgttttctgcttctctccaggactggaaggtaccgcagcttttccccagcctcctcccacccctaggctgaccccagtcagggaggagggagaccccgccctgtattcagggccaggctttccgcatcctcccaaggaatccttccctctcattccatggctcctcccttgccagctgctgatcctaggctgcctcttcctttatgaatgtggcacagttaaggttgcacccctgagtgctgtcctagttccctaacacagcaaagccacagctgcctggagggaggaagggagggagggagggagggagataagacgggagtgctcagaacctggtaccttctgctgttcattgaatttacccacccagtgaggagggatttgcaggcttgagatccatggtgggggtcctgggcatggtcacgcagtggggagtggcaaagcctggacaggctgggtagggtcagcaccccatcgtgattgatgtccctgaggtgtgagatgggagaacctggacctcaggacctgctgtcctttatgtctcttgccaaggggtggagagagagaggacaaggccattgccccatttcagcatctccaggcctgaaaggagggtctggccatggcagggatactgagttctgggagaatatgatacatgctccttgcctccccatgcccccagctcccccagtgtcctgcacacacagccggccctgctttccctctggggccttgacccttcctctcaggcaaacgcaggtggtctgattccctccctgagtcctcagtccctttcctgggtccctgggtcaatgttctcctcacccggcatctgcctgggggggtccttcctctctggccaggacagacgtgactgcttaaggcctatcctcagctccccgtcctcggccgctcctaccacgaaactgatggagacaggaggccttcactccagtccttgaaaatggagtcccttccttgtcctttattctgcccctaaacctgtgatttctccctgcaccctcatgaataatcctgacctttcctagggccagcatccagcgtgacctcagggagcagccgcccccagcctccacccctggtgagtgtcccttcagcccaggtgtgggagcccctaggcctgccctacggtgtccactcctgccagtcaccccctgggggcctctgaccctttctttggggctgcaaggaggatgtcaggaaacatgacacaggggaccccgactgtcttgttcagactgatctgtgggctctgggtcgtgggtcacctcctcgacctcagctgctcaggtctcccctgggaagaggctccctctccctgattctctgggagctgaggacccctacactctcctgcaggaggggcccaggctctcctcccaccctgctgctcactcctgtctctgtccccaggccatggtccctctcacagatccaccttctcggtaagcctgttccctccccagcccttttctactggggtcccaacagtgcaggctcagggcagggggaccatcaaccccacagcacagcactgacccacctttccccagaacagtcaggtcaaagtgagtgcctccagccaggatccgggcctctctacagggccaggaccacccacgccatgtgctgacccctccccgggaccctctacacctgaggagaaccctggagtccagcaggtgcagaatggacactgggaccatcagtcagaggcccacattaacaagggtgcggggtgggcccagccaggacaggggtcagggtgttgtgtccacactgggaggctgagctcaggggcagagctggtcaatcctgaggggaaatgagtggaagtggaggcagggaagtaagtcctggccgatcagagacaggaaccttccaggctgggcttccgtgaccctccctccctgtcccctgacatctcctctctcccctgcccaggcccctctacccagccccagaacagccactcccatctatgaggtgagtgtgggccatggatgttctggtcccgcaggctccaggggacccaggatctgcccccaccagcacctggctgagctcagattcaggaaaatgcagtgaaaatgagaacaggtggtggtgagcagaggagggaggggcctgggaacagggaccccctgagcacagccaggttcagccccagagaagccctgggtgggcccagagcctgggagatgccagacactgttctgagaaggctacaggggttgaggcctcttctctgtttttacaggaattgctatactctgatgcaaacatttactgccagatcgaccacaaagcagatgtggtctcttaggttcctctgggagctgctcttgtgggttgatggagcgtccccaaagctcccagccctggggacggggaaggacatggagcctgagccagagaaccagctctgagtcctgaggagacacaggcctggggacagggagggatgggagtccctgctgaatatctggagaccctgacaggttgccctgggctctgggtgggccgggacaaaggcctctcatcaccacaggaagcgggggcttgcaaggaaagtgaatgggcctgtggcccacccggggtcaccaggaaaggatctgaataaagaggacccttcctctcattggctctttttctgctcacgggaacttagcagaaactcacctgaaactccgtgtccattctctcccgggtcacacagggaaaatatctccaccttgtctcaaccacagtctctcttccctgggaggcagaaataggggttgggagtcaggctggggtgggccctacacaggaaagggcaagattcacatgagccctgcccagccagccgagcgctcagctgtcctcacactaccccagggaccaaggccatgcacagccccagcctgggtccctctgtgaatgcatgtggggtctcaggagcacagaagatggggccatctgatgtccacaaaaggtgagcaatgcgggagcaaccatgggtggtataggttgcggctgtggcccctacgcagcctccagtgtcctgacccctgctgccctcttcacccaggccctggaggcccagtctatcactgtcctccacaaatgaacttacctgtccccaaatccaggatcctgtgtgcttatacctggccactaggttctcctctgtcccagtggctactgctcaggacatctttatccctggtggggcacagagaggggctgtcagagcaaccaagattaatacagacgcataattcagtccttgagcactacccaggactctggcccctcattgctcatcagttcccactttaccccctggcatggatctcactgagcaagccaactctttacacaggagcatccaggtcagaggtgcaggactcccccatctaaagctcatgcaggctcccatggcgatgggacaacctgtctgctcctctccctggcccacagccctatctcgcctgcagctcctccacacacctgggacagcagttctcagcccttccctgagggcccctggaagggtgatgatctcatataggttcacttgaaccaggtgccaccttcccacaagtgagctggtgcctgcactaaagcacagagccacagttcccaagagtgttctgccactgccacaggtcccaagagtgttctgccactgccacaggttgttcgtcctgagatgagaggtaagaaaacaacccgcaatgggttgttttatatcgggatttgcatcaggatttagctctaaatgacccctgatcccacctgcacacagcgtcagatgagacaaggtgaggcctctttagttttctgttgaggctgtgacaaattaccacaagcttagtgacatagaaacctgaaccaaagtgcccacatggctgtgttctttctagaggctccagggaagagtgcatttcctctccttttccacctcctagaggcctcctgcaaccttggctgtgtcctctttctccatcttcaaagccagcagcacagcatcttgaaactattctgtgccctgcttccatccccacatctccacctcctcccacctccctctctcacttaaaaggaaggagccttgtggttattttggacgcacctgggataaaccacaacaacctccccatctcatgatccttcctttaatctgtaaagtgtcctttaccacgtgacatgtccacagatctggggatgaggatgtacacatctttgagaggcccttgttctgtccatcactcctctcaaggccatcttctcatcatcgttcactacaaactacacatgggcacctggatgggttcatcatgactgtggcgtcagttcctgcattaacatccccagcaccctccagatcctgagagagggagacggagggctctccatgcccctagtacctctccaccttcttcttggtgacatgcttagttgctaagaataacagaaagcggaggtgactgaaagatcacaactcaccggcccttcaatagttcgtggacatcagcaccacggacagtgactcagtgaggctaatttccaggtggcagcagggagcatgcagataggagggaactgcaggaaaagctgcccattctattctatatgagaaagagtgtaagaaagaggaagctattacagggataatgctattcttctctaatccataaattgcgaaacctttgcatgtctggatatcatggtttttagcacatctgctgccactccctgcagggctgattgctgcatccaggatgtggtctcttggggggctcacagcctgctttggcctcatggtgagtctccctgcccctgacactcaggccactgtctctgcctacaacatggtgggaaccttccatgattaacgtctgattctctgtgcctgacctttgaagcacatccatcactcagcctggagcatccgctgagctcagcatcctgctcctccatccccagctgagcccttgaggagatgcttgagaggatctcctgggctcctctgtgagctcctccaggctgagccttgtgcttggtgtcagaggcctttgccatctgcttgttctttccataggcaaataatcctcctcagggacaagtggggcctgaagatctgtctgaatatctatctatctatctatctatctatctatctatctatctatctatcatctatctatatgtatgtatatatgagaatgctttattaggcaaaactgcatactatgaacatgctttaaaatgcaacaggatgagatgtgaagacataaagaacaagtgtgtagtgacacatggctatcagaacacactgaagaatccacaccgcggccgagagcagtggctcacgcctgtagtcccagcacttttggaggctgaggcaggcagatcacttgaggacaggtgttcgagaccagcctgaccaacatggtgaaaccccatctctactaaaaatacaaaaaatttagccgggcctggtggctcatgcctgtagtcctggctgttcgggaggctgaggcaggagaattgcctgaacctgggagacacaagttgcagtgagctgagatcgcaccactgcactccagcctgggagatagagtgaggctccatctaaaaacaaaacaaaacaaaaagaatccacactgcttccccgcttcactttacccagaaaaggaatgttctaggccacttcctcttcagcacacatccccagggaactaaaataggttcacagtcacccccatcttcctcattcccatcacctcttacccacagaggcatctctggtcctacagatccagccctgccttcaagaggcacaggtccaacccatccagtgtccctgctagtcacacacagcactcagggtacaatggagggcttctgtgctttggatgggaacaaaccccacctcacattcccacacctgagaagccaccagggtcctctctgtcctgtcctcacactcaatgtctgtcctgggtcacccttgtcatctctcctggaaataggcatggctcctgacaggtaggattgaggctttgtcttttcaggagtccctcccactctgagcacatgaaactgctcagctccatgcaaccctctctcaccaggggccttgttctctgggtccctgaatacctgggtccatgccatgtacattttaagaaaaatgacagtgactctcaccctgacatcctcacccaaggcacgtgtctgacaagaatcaccaggtgagatacctgtggctccacacacctgaggcttcactgcgcaggggtgtcctcatccctctcctcccacccctagggacagtaagcaccacaggctgccttggaccaccagctccccctcccagacacagcctcagatctatactgacatgctacatggagaggctctgatgaacagcaggtattaggaaatcccaccgaaccaggtgccacttgcggccccactcctcctcatatctgtgactgggacagacacacataacacacctctgttcaccgcccagcccccaaggtcaatcacagtctgcttctcccctagatccactgctccccatgtcttccgtcctcagctgcatcctgggtggcctccttgctgttcttgtaccccagaggcaggttccaacctttgtgatgttgcctgcaatgcccaaactttcccttccccttccccttcccttttcccctcccccttcccctccccttcccctccccacccctatcccttcgtcttcccttgtcttcccttcccttccctataaagccaaacatacccatccacctaccttgtggtcaaagtcatcagcctcctgctccactcagtgttctctgaccctgcatatggaggtggtggcccctcctagaacacccaccactcactgtcagccttgcgtggtaatcacagattttgcaggggttacctgtgttcaggtgtgtcacctgtggaaccagaactcttggaaggactggcagagggagctgcttaggatatctcagggctcctggcatctggtctaccacagggctattaacaacagcacttagggacaaggtggaggatggacggttaagagggtaaatatggatgatgtgtgggcaaagaataggacacaggaacacatgcagtactcaaataattatgccaagaaaggtgaggacatggagatggacattcccatatacttctgatgggactgcagtttagtccctacagcaacattgacctcatcatgtttaacgcgcacacgctctgaccactatcctacttctgaaggcctccctgtgctgtgagctctgagaaggccaagcttgcctgttctgtctctgctaaagccagagaccagccaatagcccagcacagggtacttcataaatacatgttgaaggaatgagctccaggaacagtactccacatggtagagatgtgtgtatgaggatgttcactgcagaaggtcatgtcaatgtgacaagtgacgagcagcctcaaatccagcaacaggggtgtgggtaaaagatcatagtgtagccatgcaatggaaccaatgaaaaaaccacaattagagcaaatccacatgtattaataaaggaggtgccctccatacatgctgcacctaacagaatgttgccaaataagaatgaaaaatgatgatatttgggctgtaaaaactagaagtcagctaaataagaatgcatcgaaagtatttgtgaatgcttacaattttataatgccttggcatccgttttggatggaagttggactttctcataccagaagcagggctcagtcacctttgaaatagtttccagttctccacctccttccagttcctcagtgtgattgatcagatatctgatttatacaactgcctcctggtgacctcctccctatgggacttccggatacagcccgtatgactgccccactgaccccacaccctgcctgctgcagtgaccacctctaattacctggatctcatgtctgcttgcattaaatccaccaattaaaactccctgaggacaatctgtttgaataatattctgtaccctaataaaggccttgacccatgggttccccctctgtcctccccatactgcccctgacctctgtgtgtgtgtgtgggtgtgggtgtatgtgtgtgtgtgtgtgtgtgtcctccagacagggcctgtatcccccaggacctgtaagtaataaatctttattttcatcttatgtctctcgcaatcattggcaagagctctgcatcttaaagatcgcaaatttaagaaattggtgtagtcggcacaatagagtacctcttctgtttagcacaagatatctcggagctgctgaggcttttaacatcctcgccggtgtggctgcctcactggtgaggccgttctgttcagtgcaattcagttgctccactgtgtgctgctgtgttgctgctgtagagtgctgccatgttgttctccccaaattgttaccgagtaggaacctgtaatgtgctcccaaggtggtctaccccatgagaagggggattctccatctagggcaagggctaggtgtgtttctggaatcctaatagggaaggcatccacagagggtgaactccactcctccttagagtgaggagtgacatttcccatttattttccccatggaggtgccatgtattgactttttctttcactgtcccaaggttgagccaaggtgagctatggagaccagggcaagataccatttctgttagcaaagcaaatgggtgacaacgtgtggagaagctgtggttctcctgatggatatagcagagtgccatttagtaaaatcttgtcaggaggctgcccctggttagaccggcagtgtctgtagtcactaaggtggatgcgaattttaggccctgggccatggataatccctgcagacacagccgtggcttcatgtgatggggcaatcccgggctagtggctcccttgtttctgcatttcttgctgtggttgcacaatcaacacctcaggggttgattgggtcaccttggaaagagaaacagctgcctaggaggctggtgcacatggaggccaccctcaattttattctgctaacaagttgtaagattaaaacaacagggggctttgggtaccatcaggaacttgtcaagtaaacatccaaagacagaaagaagaaaaagaaaaagacattaaccgtctagaaatacaagccattttaaagattttgcttaaaagatgcgcttgggctgggagcggtggctcacacctgtaatcccagcactttgggaggccaaggtgggtggatcgactgaggtcaggagttcaagaccagcctgaccaacatggtgaaacctcgcctctactaaaaatacaaaaaattagcagggcatggtggcaggtgcctgtaatcccagctacttgggtggagaatcgcttgaacccgggaggcagagacggcagtgagccaagatcgcaccactgtactccagtctgggcgacagagtgagacttcatctcaaaaaaaaaaaaaaaaaaaaaaaaaagacgggcttgtttcgtcgttgtggagtcatcccagagagaggctactccctagagtcactgaccacctttcctcctccatcttttcctcttatcattctagagacagaaaacaagaatctcagctttaggtggctaacctcaccccccaagaaaagaaactaccactttgattgactacaaatccaagaaaaataaaagagaaactttaaaaagtactgagcaaaccacaggtctagcaaacataatgctagccctaggttacttattcatttacaacaaacccctagatataggaggaaaaaataaaaggtaattaaatatatacacatacaatattttaatataaatatataataaatagttaaattatgtatgtataatatgtaactaaatcaaagtaaaatttcatactttgattctattggaaattcaaaattcatttattaacttatatattaaggaatttatgtaaaaaaagatttttaaaagggcaccaatttgcttttgtgtctctacaacataggatctaatttaactttacatttgctaaatacactaattgacaaatattcatggatttaatcaatactggggctcaaattgtagccacacgtgggaatcccataaatttaaacactctgtccctattatcttgagaagaaaactaaatataaaattgaaaaaaacaggtatgtctcaatttacctgtaactttgcctaaatttcccggagtcatatacccattgctgtaaaacattctctattggacataggtgctctgagacaataaataaaatagaagtgtttttggtacttagacattggcttgacaaaatgggatcccatgaaacctcagttaagatagtgaatacggcccaatgtgagttgaaatggggcctttaaggattaaaacttattacatgaaacctagtaagtaatggggtgattatccatactgcttctccatttcatagcccaattttgacagttgtcaaatctggaaaaaacaaacaaacaaacaaaaaaacccctgggaatctgttgcctcacagagacacaaagtagacatcaaaattgtatatctcagttccagttccaaaatggtggcatagaagcaagctggctttactccttcacacagaaaaccaaaaacaaatatacagcaccaaaattattaccagatatattccagaactcaaatatgaaaatgaaacagttttcagagccacagagaagtgaaaaaaactcccgacagatgacaaaagaatcagatttccccatctgtaatgtccctccctgccccattctgcctggtaccaggtgtgtggaaaattttaccccaactcatggtttctacactgggaaatgtaagatcaatgcgggcaaccagtttctgcacaatcctgggttccctgtccctgccttaacccacaagaagcattgtgagtgcccgaagggagaaatttccctgaggacagtcaaagagtggggaggcaggactaccatctccttccctggaaactctgctgtgtaactcagccaagggagacatgaaatcagactggtgtttcagcagctccatgttgtagtaggtttgtttcacaggtatcctgggcatggacatctagccagctttcccacactgccaggatatcccctttgggacctccctcagttaggaagggcacactctgatcatttactagggccaaggtaaaccctaaaggtaacttagagatgaaaaggaggtagtgacctagcagtaaagaactctaagaaaatctatccaataaaaatcaaaacaagccagacaaagactaaaataaataatgaatccttcaatgtaaagacctggacttacatccacaagaaacagtaagcaggtaaccatgatctccccacatggacaaagtgaggaacaagtgactgatcctgatgagatggtgatgtgtgagctctctaatcaagaattcaaaactgcagttttaaggaaactcaatgatcttcaagaaaacatggaaaagcagttcagaaatttatcagagaaatttaacgaagggattgaaataatttaaagaaaacaaacaggaatcttggaattgagaaatatatttgctgaacaggaaaatttattagagtctctcaacagcagaatggatcagaggaaagaatcaacccaaataagactcccccaaggcataaaataatcgaattctcaaaagtcaagggcaaagagaagattttaaaacagaaagagaaaagaagcaaatggcataaagaagctccaattctgtggcaacagattttcagtggaaatcatacagaccaggagggagtgacatgacattctcaaaatgctgaaaaaatattgacatttgagaatactttatccagtgaagttatccttcaatataaaggagagagaaagtttcctagacaaacaaaagctgagataattcacaccatcagactagtcttcctgtaaatactaaagggtaaatactaaatacttcaatgtgaaagtaaaaaaaaaaacactaacatgcaaaacaaccacaacaacaataacaacatttgaaggtataaaatccactggtgaaattaagtacgtagacaaacccagaatactcaaatagtaattgtggaaagtaatccaatcataactctagcatgagtctcaaaatataaatctatcaaaaacaataatacattttaggaggccaaggttggcagattccttgaggtcaagagttcaagaccagcctggtcaaaatggtgaaaccccatctctaccaaaaaatacaaaaatttgcagggtatggtagcacatgcctgtcgtttcagctatttgggaggctgaggcaggagaattgcttgaacccaggaggtggaggttgcagtgagctgagattgcactactgcactccagcctgggtgacagagggagactctgtcttaaaaaaaaatagctacctgtttggagaaaggtaatataaaatatgtaaatagagacaaagtcaaaatttgcaaaggatgaaattaaagagtagagtttttttggggggttttctgtttctattattttatttgtgatctaagataagttgttaccttttcttctcttgaagatactttgttatatctatgtttttggaagtcttatggtaactgcaacgcaaaaaatctatgatagatccactgaaaataaaaaacaatgacttaaaacatactaccagagacaatcaaccacaaggaagacagtaaaaaatgaagaaaggaagaggggagttacaaaacaaccagaaaacaggcaacaaagtggcagtagtaagttcttacttaaaaatattgaacactgaatataaatggactctattctccaattaaaaggcatagagtggctgaatgctgcctatatgctgcctacaagaaaccacttcatgtaaaaagatacaaatagactgaaagtgaagggggtggaaaaagatatttcatgcaagtggaaaccaaaagagagcaggagtagctatactgatatgagataaactacaaatcaaagactataaaaagagacaaagaaagtcactatgtaatgataaagcgctcagttcagcaagaggagatgccaattataaatatctatgcatccaacacttgagctcccaagtctcccaagtatttaaagcaaacaatagtggatctaaaaggagagatagactgaatacaatattaattaggggactttaacaccctgctctcagcaatggccagatctttcagacagaaaatcaacaaggaaacttcaaagttaaactacacactagatcaaataggcctaactggcatttacgggacatttcactaactatctaactgttacagaattcacattattttcatcagcacatagaacattcttcagaacagaccacatcttaagtcccaaaaccagtcagaataaattcaaaaaagtttatatcacatcaagcatttgttctgaccacaatggaataaaactacaataaatgaataactttctggacacatacaacctaccaagatggaagcatgaaaaggcagaaaaacccaacaaaccaacatgaaactgtaacaaaaggaaaacccaggaccgaatgacttcactgctgaattctaccaaacatttaataagaactaaaaccaattctactcaaaatgctttaaaaaattgaagaggatggaacactttcaaactcattctacaaggtcagcattatcctgataccaaaaccagacaaggacaggacaaaaacaaacaaacaaacaaacaaacaaacaaacaaaaaaacactacaggattgcttgaggccaggagtttgagatcagcctgggcaacatagtcagaaccaatctcttaaaaaaaaaaaaaaagaaaaaaattagccaggcatggtggcatgtgcctttagtcctagctactcgggaggctgaggtgagaggaccaattgagcccaggaggttgaggccgcagtgagccatgtttgtgtcactgtactccagcctggggaacagagcaagatgctctctcaaaaacaaaaagcaagctgggtgtggtggctcctgcctgtaatcacagcactttggaaggctgaggtgggagaactgcttaagcccaggagttcaagaccagtctggacaacatagggggactccatctctcaaaaacaaccaaccaaaacaaagccaaaaaagaacataggccaacatcactaacaaacatagatgtaaaagtcctcaataaaatattaacaaaccatgtttagaaacacatcaaaagagatcattcactatgattaagtgagattcatcccagggatgccagtatggctcaacatatgcaaatcaataaatgtgatccatcacattaaagagaaccaagaacaaaaaccatataatcactccagcaagtgcagaaaaggcatttaataaaagaatgggttgagggagtggagcccatagtcagagcagcagtggtctgggattttggaagtagaaagaagggcagcaccactggccaggaccaccagggaacacccccataggccctgggtgttgtgctccagggagggttccctctggagttattaatcttggtgtccactttgcccagctgcccctcacagggtcagggaggatgaagggaaagcttccttctaatgaaagttcagggactcacagttcctagagcctgtagggagaggaagatcttcgaggaagagcacctgggcattggggcgtttgagaggaagatctatgccaggtccaagtggacaacctgtggactctctctccagggacatacgggtatctgggaatctcctgtagcttaaagaggtaaagacctctccctttagcctgaggactggaggatgctggttcaggtgaatgagtcctgcaggggctggtacaggcctggagggtggtggtgtccagggccttgggttcacccttagcatgattcaggccgggcggtgtttcacatgagcaagagggcctgggttcattgcttcaggacaatggtgaaatctcatggtggaagaaatcttgtccttgccagtgcccagctttcatttggtcttggcccagagtgtcctccctagagaagactcttgtcccttcttcacactgcccttcagggatatgccagccttatgggataagatggggtggagactgtagatgtgggtgggaatctctccacagagtgctccttctctcagcggttgcaccttgtctcagggcttcagcttgaaatctgggatctccaagcccttccctccccagtcctggccaggaccacatgggcagatgcattgtgtgaagtgcatttcatttggggtgtcctctctgcatggcaccctcccgttgattctctttgcgcatgtcagagtgcaggcaccatccacacctcctgctggaggagggacggagctgttgactcctgagagctgatcatgtgttcccaccctcacacacaatcatggtccatcctctgagggacatgtgttgccaccactgtggagatggtgcaactgacagtaacaaacagtaaaatctggtactgaatgggaccttaagccaacaatgacaatgtcattccaaggtgtttcatttttattgattcaatgcaagtcacctgatttcattgactattcacaatagctcgataaagtaaatgcatcatcaccaccactttaaagaggaaaaaggtgcttgggcagtttgtgactactgtggtggctgctgcattgctctctggtaaagccaagtaggtggtgggtgcggcctctgggctgggatgatccaccctcctggtggtggcaggggagccaagctggagccatggcctgtgcagtggtagcagctgaactgaccgctgctgcaggatttgcaagctgttacattttgcgaagccatgaagcacataaaacctcaagtagaacaagtgtttcaaagtctaccaaaatctgccttcagagattattactacagaggtggatatgaacccaaaatgacaaaacgggaagcagcattaatactagataatgaatgaacactagtaatagtagggtaagccctactgccaataaagaaaaaaataagagatgctcattaacatgttatgctcttaaatcacgcagacaaaagagggtctccttatatagtagccacaatcaatgaagctaaagatttactgcaagatcaagctaaaaacagtaggtgtataatgaatttttaacttcatattagtttatgtatatgaatatcaagtttttataataaaatgcctccaaacaaagaatatttgatttagggtttaataacttctaagaggggactcagatgtttcctgtttcacagtcagtctgagagggtcatttttcctggagctgacctgggtggaggcctcacactgatactccccagcatcctctctcctgatggggtttatgctgagcatacagtggccctgggacagctccattctctccatgagtcacagacgctggtcatggaagatccactggataaggttccagagtcatctgtggggcaggtcaggatcacaacatccttttcttctgtgactctggtgttgctgactcagatggggtcggagccactgaccctgtggacaatcagtggaggtgctcaactgaaagtgggctgagggcacgtcttctcctccatccctgggtccttaaggtaactgtggaccccagaccaactgacacaggagctagaaagaaattatttaggaagttagtgagggtaagagcgtccttggcaaggtttcccctttaacaaaaagcagcccaagataattccttttctaacaaagagcagcctgaaaaattgagctacagatgtagatgagcaagatggaagcttgcacaggtgaattccagtaggtgtgccaatagaaaagggctgcctggaagccaggtatgttcaacatggagactccatcctcccttttctccattaccacatgtacagtaaaaaaccaggcaacatggcaccggccaggtagacaatccatctgcatgacaaaagatcagagtggggcagccagcaaatggcacagctggtctaaacaatctttcaccccctgtataaatcagacactgcctcctgaagctcatctataaaaccttctgcatttcactatggaagtggcaacccattttccccaggacccctctctctgtgcagagagctcttctctttctttcccctatgaaacttccactcttaacttcactctgggtgcctgcatcctagttttccatggccatgggacaatgaacctcgagtattaccccagatgaatgatgctgtttcacaatcactggttcagctcccttcttcttagggtttcacagctcggtggggagaataccacgcctcagtggtctggggagtgaggaacaaatgaagaattaatcagattttacttagaacgctatcacctgcctcaaccatcagatccatgttgggaatgtccaggcctcctctcttagatctatacccacttcactggacctgaaatcctgtgtttcccgatgtgttggtgtcactcctatgagaggataaaggagagaactttgctttctctccccactcacaccctgcacaagacagggcccaatatgagacacacactcgctcagtagttctctcatgaaggagggagggagtgacctcgagtgattctgccatctgtagtctgtgtaccctggccagtggctgtatcttcatatgcctcagtttcccctcagtaaaataggacacacaatgagaactaaaaataaaattctaattccccagtgaactgaaaggatggcctcttggccaagcggatcccagagttcctgatcatgacaggatgggaggttacacctcattacagcccctccctttggaagtttagaggtgacaactgactagcattaacgctaaaatcgagatcatgagactgacagaacagactctctgtggccataagataccaaattataaactcaacctaaggtcatgcaggcaagggctaagccacactttcctacatttaaagaataagctatgttctaacacagaattttctttctctctagcggctaaagtaacactagccttcgagataagcaatattgaaatgatcgcggctcatccaccaacactggctaactgacccctgttccaacagccacaactacacttcaattggacaggagactgatttcagtaactttctcctaataagagaccactgagcatggcctggttctgctggtatacagacacggtgcactgagtaccataatgcttgtttcatcttttgatgtataagacctaatttaatacatttaaatctgaattctccaccccaaagtgaacatggggtgcatgtagcatgcatgtttgttgatcacgcatgtgcgtgtacttcctttgtgagtatccatagctccacctataacctgttgaatatgtatacctggccaactcattcagcataaatctatcttccacattcccctcccttgaagtgcctgctattggtctctgctggaggctgcatcttctaccctggggaatggccagcctgcaggctgtaaccctgtgtaagaaataacctggttgggtgcagtggctcacacctgtaatcccagtggtttgggaggttgaagtggtagaatagtttgagctcaggagccagagactagcctgggcagcatagcaagatcctgtctcttaaaaaaattttagggaggagagtgaggatcagaaaaaatacctattggctattatgcttagtacttggatcatgaaataatctgtataccaaacccctgattacatatataacaaacctgcatgcgtatctttgaacctaagataaaagtttgttttaaaaactatctgggtgcagtggtgcatgcctatagttccagctactcgagactgaggtgtgaggagtgcttgagctcgggggattgaggctgcagtgaattatggtcccacctgtgagtagccacttcactcaaacctgggagacagagcaagaaccggtctctaaaaaaaaataaaaatagaaaaataaaatgaaaaatatatgaaataaagtctcctttccaaacgtacagatctccgatttttctgccaacaatgataaatggtcagtggcttgccatgttgtctgtgaattacttttaaaatattcacgatcacctgacctaaaggttggtaccaaggaaccgcctgaatacaccgtctctgattatttgcctccaacagagtgttccctgggcctgatctctggtggacaatgagctgctgggaacatcctctcttctctattcctcccctggggatgctgaccttcccttggagtctcctaagttccccagggcagtcggctaatgtcctagggagcttacctgtcttctccataccaagtctcatgtgaaggacgaggctttgcccttgcccagatgaggctctgggggctgagccctggctggctaccagctgcaagagccatggcccttggacagctggtaaatccttgttcccagtcagccctgcccaagatgcctcaacccagccccggcacaggcttcccagggtcacatggagtcaggatcctgggacaggggactggacaggggtttccagggctgagtttctgaacaggggcttcccaggggtcccctcactccaggatctgacatggtcctacaaggaacgtccatggggaggggacccaggagggggaactgacactgacctccccttactgagcctccccccaaccccatcagactgtccttcctctgtagcaagtgcctgcagggtctggatgcaggaaagaaattctgatctgtggaagtttgtctcccctgtgtgtgtcttgcactaaatgtccaaacccccaaatgggatgtaatgtagagggggacacaggcacagcccaggcctgaaaatcctgtgtgtgtgaagcagaactgacccccaacacccagagctcatgagacatcactgtgtacgtgaaactggccagttacttcttcattcacaagatctgtttttatgacttgtagggtgtaggatcctgtgtcattgttggtgacattctgtatcagcagacatgtattggggtatattgtctctcagcctctgtggcaggtcctggggtaattacttgagttcctagtacatatcctgtaattcccctttgtaccagttgtagccaagcctaaggcagattgtgggtgagtggaagaatctccttgccttctgcagcttcaacagtgacttgggcagtggtaggcaagttccagaaagttaaaagtgaggctaggagtggggagagagcatcagttaatactgggccctatgcattgaggtggaaagatggggccctaggtcctggacaggtctcttcatccctcagccttggagtgtgtgtgtgtgtgtgtgtgtgtgtgtgtgtgtgtgtgtgcgcgcgcgcgcgtgcgtgcgtgtcctactgggccaaggtcagcagcatgacctcccttccttcagtgcctctgaccttggcatttccctgtttggagtccttttccccaggggtctgcctggctccctccctactgccttcaggtcctgctcacattagggcatccttgggagaccccttccctgacacctctagagaccctgggtcttccctttctgacctttcgctgctgtgttccctccagggctcttgtcaatacttgacctcacattctagatacccttgcatgtctgtcttcctccctatgagagcatgagctctgtgagaacagggacttgtgtgatcttggttgcaccccagtgcctgggacaggctgcggactcctgtggatgagctcatgagtgttcccagggcccttcacaacgtgggatttattttccaatggctgaggttgttggctaagagctctgttggagttcaatcaggctggtgggaaaaatattagagatagttatagagatagacacaaatcttcttggaagaccaaaaagtttgcataactttggtaatagatctgactgaaggtggtccctttacctttagttaaacaaattaaagtagtaacaaaggaaggcagagtagtttgtctagccagcttgtttactcatgtgatcttaagactaaccattgatgtgccacaggtgcttaattgctttctacttgggaagtccacaatgtcaattaccctctaacggtgttgactcaagcctttgttaattaatcttactgaataaatatgagtctcactagctgatcaaggccatggtcacaactgtttataggactcagcagggagtctgtaagcggccctgacagactcagctggactggcaaagcaaaatatgtgtgtgtcagtgtacactattcacccgtcccccacagctggtgcccctatatgaggagtgctgccacagagctctgtttagtgtcccttgttttttttcttgagtattaccccaacttaaattgtgattattgtcatctgttttcaacattaactgctcagtgatgattcacttggaaaacattaacaatcgagattgtttcttcactaacaacctcagattatttagattttcctgttgtaatcccttcttcctgtttagtgtccaacagaagccctctgtccctctcaggtccccgttctctccaagaaaccccagccagtctctgtgctccctcctcccatccactcccagggagccctcccctcacctgtgagcagaagcgcctgccagggatgtgcactctgtgaggaggggctgagggaggccccatgggctctgctgtctgctttgtcctcctctgtggagaggagcttgggcttcagaaaataaggaggccagaaagtaaggaacaggctgagaaataatggggatgtgtcgaaaggtcacagatgccaacatctttgtcctatgcaatattatccataaaattacaggtttgagatatgcttaaattttcttctaacatgcattaaaataaacatataacttttaatagttatattaaattgtatttaatataaattaaatgctcttgtcagagctactgtgactgtcagctctgctgtccttcctctctctgtgctaagcctcctcccagggcagaagcacttcccagggccaggggtgggggcggggaaaggtaagtggcaatgaggatctgcacaggtagcctttccgcctcctcccctctcagtcctgcctccttgtcttcttttcctctttttctccaatctacatttcagttccttagaccacgctgtgagaagcaaggcttattgggacccccatcccttaacaggatgacctgtgctccccataagtgacctctgctgtgtctagggattggctctgtcagcacctcacagagagtccctggggcccccaaactcagtgttattttctctatgacacagaaacccctctgggtatgcaaggttttcctcatgttttctaatgtctgggaaggttggatttactcccagcagggaggtcacagagatgtccagggagtggggtcctagaaatggacaaatctagagctaaagcccaggtctacgattttcagttgtttttttctgcagtgctatgtgaccctaatttcctaggagtaactaaaatgcaaacctcagacatttgtagacattttatgatttttctctacagcttgtaccactgttattattatttgctttatgctttttcctaaataaatttactttacaaaacatccttgtcctagtagggtgcaggggctcacgtctgtgatctcagctgcttgagaggttgaggtgggtggattgcttgaggacgggaatttgagacaaaacatctttgtcctatgcaatattatccataaaattacaggtttgagatatgcttaaattttcttctaacatgtattaaaataaacatataacttttaatcatcatattaaattgtatttaatataaatttatatacaatacatttttatataataaattatatatataaatgtatatataatagtttttcttttttgagatggagtctggctctgtctcccaggctggagtgcagtggcacgatctcagctcactgcagcctccgccttctgggttcaaacgattctcctacctcagcctcccgagtagctgggattacaggcgcctgccgccacgcccagctaatttttgtacttttttagtagagatggggtttcgccatgttggccaggctggtctcaaacacctgacttcaggtgatatgccgcctcggcctcccaaagtgctgggattacaggcatgagccaccatgcctggcctatatattttatataattatataaagttttctataataaattttatataataatatataaaatggatatttatttaagataaagttattagttttatatatttacatatatttaggaataaatgtgttactgtgggagcccagtgcccaggcaggtagtcagtacatgatggttgtcattagggttaatactttggaattctggattttttcccaagagagtgtctacgctggaatattgggcttgtggctttctgctgatgtgcatgtgtgaagaagctacttccacttattaggacttgtgtatctgtctcgcagtttcactacctattttctcgtgatgttggtcaagtcgcctaacttttctgtgcctcatttacctaatttgtagaatatgggtaacagtacacaagtgtgagtgtgtatttcccaggactgaccactagagggcgtgaaggcaccggcacttactattacagcaatgggtgtagtagtgctcatggtcgtaaacatcattctcccatgaaaggaaccagggcttcctgggagaaataactgattccagggctggggccggaaagcacaagcggagcctggagcatctcgtgaggccagaaagtaaggagccggctgaaaaataatggagatctgtcgaaaggtcacagatgccaaccagaaggagctttgaatgaccaattttgagacaaaatgagcactataagaaataatgatagtaataaattccaacccataaatacccatgagttcctactaatataaataaataattgaatacataaatatataaggatgaagaaacagctttttcttacagcagaattccaattaatgaatgtagaaggaatgatcaaatagaaaatcactatttggctaacagcacagtcaattgtttgtaggcaagaattatcaatggactttaaatatgaatgggtaaaagtatgatgatgctacaactagtgagtaccaagggggaaaaaaaagtacgttgagaagaaacaggctacttccatattcccaaagtatcacttcaggagctacttattgattataatgggacaaatagtaacttacagtagagaaacctggcaacagagtctctccgaggtacaaaggctctcttcaggaaggaggtaaggggaaggaagaagaaaacactgtcctgcctcaattatttgctttccccattctcaagtgtacttcatagacattcaaagatatgtgttgatagtgtccacgatccacatggctctattatagtcatttattcacacatacattcagtgaggctttgagtgcctaatgtgtgcctgatatttgctagatggtggatgctgagaagatcaggtgtgctgctgtctctagggtgactgaatccacctgccccactttacagatgtggaaattaaagtgaaaaggatttataggattagttcactgtcacaaggtcactagccttaaagttacaggagtaaagcaagtttcctgacttgctagattttctgctgcaggtgctgacaatggtgagctccaataggagagaggacactcagagtgaagtgggagccctgaacaccctggattagccaagaggacatgccgggtccagctgtgaccgcacaaaggaccattggggatatttgtattctctttttcacttagagcttgaaatgaggaaaactaagtgcagaaaaccaagagtggaagatttttcacaaagcactggtaacatgcatcagaaaaccctgtgctgatgtctgtcacggtgtttctcactgaacggtaatagtctggctttgagtgtgttccctctacagcctggagttctgcgaggcagggaccaggtgtgattcatctttgtctctccagtgacagtacacagcaggctctgataaatatttcttacaaaataaaatggaataaaaagtagacatctgcacaggtgtgggatgactgagcagcagcagaagcaggaaaagtcagcgtccccagatcagctgatgtggtgttcggattctagataggggtgaggtgccaggatggggatgggggtcctgtggctctgctgccctgggggacacccctaggtttcacagtgcctgctgtggttgctgcactttgcttccccatgggaaagtgatcagagggtgtggggcttcaggtgaccccatgtgggaaatggccaagggaaggtggggtgggcggcacatggttttttttaaccaatatttgaaggtaggttgtatgaaaaggtgttaggcttatttcagcttatggggagtaggacagggattggtgagtgtgtatcaggtatattttggctcaggatggaaaagaactgtcacagtaacataaggtcttttgggaaattacatgtttactggcagagttcaggccagggctgggtgtctgaaaatacctgtcagggtcacttttatggttacaagggcagagcttggcttggaaccaggtttcttactaataccacatattaagtattataaaaactgtcctttgcaataggacattgctctatgatgcaggttgaggtccctctgtttaagtaattgtgggtggctgtgattctctcatctagtctgcgacttggacttcacctccatctgcagtccctctcctttgctgttgacactggtcagagttaagcgcatttactgacgatggtcacagggtggcagcactgcctctctggtattttctaaaacctcttcctggaactgagccagtctaagaggatgtcatgactaagaaaagggcactaatgaggtgaacagataattttttttttcttgtttctcctgtgaagtaacagagtggaggtgagcatggaataattgccttttagaaatggaagacaatggagagaagtgtttcgcaaaccttaatgtgttcacagatcccacacagatctttttattcaatacagattctgatttttctggtgaggcctgagattgtgcatgtctaaggagcttttggatgatgccattgctgctggttggcggaccacactttgagtagcaaggctcgaagatcatttagaggttaattctcactgcatctaatttatggatgaaaacaaaccaaggtccagagagagcatatacagcttgcctaacaaagccattccctaagtgcctgacttcttgcatttaaacccagggcttcagcctttgtccagttctcactccacacatcacacggtttgttcactgttgtgaacgacagttgtggcagcatctctttagtttaggaatccagagccccaatttcactaccctctttggtcttggctcatgctgtgacttcgaatagttttgcccttacttaaaatcttcagtggctcttttgtaatcacaagatcaagttcgaatatctctgtctagtgttcatggctttataacatatggtatctctttagtaaccttacctaacttccctgttttaaaattgtctcttgctgccatagccctccttgctccttcctgctccctaacaaactgtgttcacttctctctcagtggtagtgatgatggcatggcctctgatgttagactcatgtaacttctaatcccagatccaccaccaacattggcaagttgattcatctttctgaggataagcatcctcctctgaaataaacttagatggcggttgagaggggtaaataaaataacacacaaacccactctcatccctgagaccctcttcaaaactagcatataaaaatagctatttgaagaggttcagtgaaattcaaggtaacacagagaaggaattcagaatcctatcagataaatttaatagactgaaataatttttaaaaatcaggcagaaattctgtagctgaaaaattcaattgacaaaccgaagaatgcactaaatctttcaacagcagaattgatcaagcagaagaaagaatttgtgagcttgaagagataatatatgaaaactcagagtcagagagacaaaagaaaaaagaattaaaagaataatgcatgcctacaaggtttgattattaagctactcaaagagatacaagagaagggtgaaaaccaacataaagaaatgtaaaaaacaatcagaatataaatgaaaaattttctaaaatgctagctagtttttttttgagacaggctcttactctcatcacccatgctggagtgaagtggcacagtcatggctcactgcaggctcaacttcctgggctcagatgattctcccacattagccttccaagtagctaggactaaaggcgtgtgccaccaggccaggctaattttttgtatttttagtagagatggggttttgccatcttacccagggctggtcttgaactcctgggctcaagtgatccaggagattcactgccaaaaaggatataaccaagtcatatagtcataggttatctaaagtcaatgtgaaggcaagaattctaagagcagtgagacaaaagcatcaattaacttataaaggaaaacctatcagtctaacaccagatttctcatcagaaaccttacaaaccagaaggtattggggtcctaatcttttggcttcttaaacagaatagctctcagccaagaatcttgtgtagagtgaaattatatttcaaaatgaaagagagaaatacagtctttttcaggcaagcaaatgcttcaggatttgtcacggctagaccatcctacatggaatgttaaagggacttctaaatcacaaaacaaaagatttaaatagaacagaatagaacctcttgaaaccaaaaaattcaaatggcctataaaacaataacacaataagaaaacaaagtagataacgatcaacatgatgactggaacaaatattaacattgaatgtaaatgacctaacactccacttaaaagacacagattggcaagataaataaaaaatcacaaaccaaatatcagctgtcttcaagagactcacttaacatgtaaggattcttatagactcaaggtaaagagatgataaaagatattccatgcaaatggaaaccataagtgagaaggaatagctatccttatatcatataaaacagactttaagcaacaacagtaagaaaaagacaaataaggcaactatataatgataaaaggatcaatcaaacaagaagatattacaatcctaaatatatatgcacctaactttggagctcccacattcataaaacggttatgatgagacctaagaaaaaagatcaacacaaaacagtgagggtgtcctgggttttctttttattggacagcagtgtactagcctatcactttcccagtcaggggatttttggtctccccattcccctaccatgggttcatgccaaagtccatattttttattagtgtttggaattggattttttttttttgaggtggagtctcgctctgttgcctaggctggagtgtagtggcacgatctcggctcactaacctctgcctcctgggttcaagcaattcttctgcctcagcctcctgagtacctgggactacaggtgcatgccaccacacccagctaatttttgtatttttagtagaaacgagatttcaccatattgtccaggcttgtatagaactcctgacctcatgtgacagggaaacaggcactcagtgaacttcatgcgattgaggagttaatgataatgagagaagggctgtgaggggacagcactggggacaccagagcctgtgacgggctgagttgctgtgccttgggagatgcccttttgactgagccctgggaaggagggggtgtgggggcaggagctgcctgcagagggagtggcctcaggtgggcggccacctggctgcagggaagaggtgacagagttcgtgtgcagagcttggagggtgaggaggaggtgggttgaggtgaccttggtgagggtgaaccatggggggctgtgggccctgctgagggaggccagccagccctggacctacagggtggtttggtcttttttgtcccattcccagcatccactgagtggtgaaactctgcaggccagggaccatcccactggccagaaggagcgcacagtaggtgcccactcagtgcatgttgggctggacagaacctcactctgccccctgcccccagctttgggagctgcagcaaggtccctccccctagggatctccatgcctctgtctctgaggggtgagatggggagacttcaaagggccatctcagagtgtgggggatagagacgcagaagtgtgggggatagagggaggcctgggctctagacccaaaggaccttacacacctcctgagtcttttcaaatggtttcttctgttactttaaaaatgatgtaagtcatcatatttattgtaaatcccaggaatctaatcatgcgtaaaataaggtgtcttatccttgaccccaccccttccccaattaaatttccaggatgttaccactgtttgcagttggtgtgaatctctctttaataatactctgtttatctcacttgtcgttttacgccaaaatacccattgaattatattattgctgaagaccattcttttttttttttttttttttgagatggattcttgctctgttgcccaggctggagtgcaatggtgtgatctcggctcactgcaacctctgcctcctgggttcaagtgattctcctgcctcagcctcctgagtttctgggattacaggtgcacaccaccacacctggctaatttttgtatttttagtaaagacagggtttcaccatgttggtcaggctggtctcgaactcctgacctcatgatccaccctccttggcctcccaaaatgctgggattacaggcatgagccaccacacctgcccagaccattctgttctactgaatcatgtgtggtgggcacctcttatatcaatacatatggattttatcttgtgtttgttattggctcccctttttctcattgcatggctacactcaatgctttgtccacacccctgttcctgggttggaatcttgtgacagaaaatgaagtaacaaaggctaaagctttctaaagtggagtcaggagattgcaagacaattgcactttcaccagcaagagctcaaaccacagaatgttccaatagatttggataaacagctgaagtcagtattcaccagccttcaacatctcaactaggagaaccctaaaattaactaagcacatagaatggaatggacttgtgatttaggattccttctcagccaatgagctgcttctgaaaacaactttttgtggaaattacctgtaaagaaaaccctctcctgtgcttgtcttacagaacactagtcagggctgccctgattcagtggacccgaattgctattatttgtttcctaaacatatggtattttctgtgaccttcatctcaatcttttttttaagttactgggctgtttcccagttttcataatgacgagacattctgcagtgtttcatacacatgtcttttccccatgtggagtattgatccaggagctcattcagtcaacgcatgtttatgaagcatcctgtgccaggctgtgggctggtcactgtcttcagcagagagaggacaggcacagtcttgccttcacagagctcacagctcagggaggctcttagaagtgggatactggtcggagcatgtgcacattaaacatgatgaggtcaaggttgctatagggactaaaccacagtcccaccaagatcgcattgagttcctgtggtagaccagaggtcagggcccctaagatgtcctgagcagctccctctgctcagaagttttggttccacaggtgacacacctgagcacaggtgacccctgcagaacctgtgattaccacccaaagccaagagtgagtggtgggtgttctaggaggaaccgtcacctccatgggcagggttggggaagactgaggggagcaggtggctgatgactttggccagaaggtagggggatgggcaggtgtgcgctcatagggaagggaagagaagggagggcattgcaggcaacaacacaaaggttggaacctgccttcatggactgagaaaagcagggagtccacccaggctgcagctggggagggaagacatggggagcagtgggtctaggggagaagcagactgcgattgaccttggggactgggcagtgagcagaggtgtgttatgtgtgtctgtccccatcatagatatgaggaggggtgaggccgcgggtggcacctgggtcggtgggatttcatagtgcctgctgttccctagagcctctctgtatagagggtcagaatagatctgaggctgtggtctgggggaaggggctggtggtgcttaccatctctaggggtgggaggagagggatgaggatgcccctgagcagtgaagcctcaaggtgtgtggagccacagttgtctctcattagacatgtgttttgcgtgaggatgccagggcctggtggttattactgttgtcaagtttgcatgacaaggacccaggtatccagggatccagagcacagggcccctggtgaggggatgaggctcagatggggctgaccaggttcatgtggtcagagtgggagggactgatggagagacagagcctcaacccctcctgtcaggagctgtggctatgtccaggagagatgacaaggatgacccaggacattgagtgagtcattgagacattgaaggtgaggacagggcagagaggaccctggtgactgctgaaatgtaggatgtgaggagggctctgacccatgcaagttacaggacctccccacccccgagcccacagatgacccttaaattgggcatcctgagtgctgtgtgtgcccagcagggacactggataggctggacctgagtctctgtaagggcagcgctggtctgtaggaccagagtcttctctgtgggtgtgacgtgggcaggaattagcaagatgggggtgacaaggcttggcttggaggatctggtacagaagcccatgggcttggtcagctcagcttctcaggggctcagctggggctggaggagcaggatgctgtgctcagggcatgctccaggcagcgtgatgtgtgtggttccagggtcaggcacgggggtcaaaaattaaccatgaaaagttcccaccttctgtaggcagagaaaatggcctgattgtcagggtcagggagacttaccatgtggccaaagcaggctctcagcctcccagagaccacaccctgggtgcagcactcagctctgcagggtatggcaatagatgtgccaagaaccccaacatccagatgcatgcaaaaattttgcgatatataaaatagagcagatcaagtttccctgcaataacgttgttcctggttgtgtctttttcttgtaaactagacatggacatctttccagcagtctgttctcatctgccaccttcctgctgcagcacctcagaatgaacattcctgagacactgtccgtggtgctgacgaccaagagctatggaacagagtgtgatgtagaatcttctagttacctctgctctcctttcacttttaacaacagagcatcattaacaatgagaaggtggagaggtgttcaggatcttgaagtgacttctgtcttgctctcccataaccctgaagctgctgtagacattattgcagaaactgacaccacagtcaggatggccttgtccaggagcccatgtgcagtttgtagtgagcaaggatgagaaaatggtcttgaaaggggtgatggacagaacaggggcttttcaaaaatgtcacatcatcacccccagcatccgtgaatctgtcacatggtaagagaccttacagattaaatgaaggattatgagtttggaagattattgtagtttatccagatgggtccaacataatcacagaatcccttccttacaaatgagagagggaggtgggagagtcagagaaggaggaggagatgtggggatagatgcagaagacagagcggtgtcaagatgctgcactgctggctttgaagatggagaaagaggacacagccaaggatgcaggaggcctctaggaggtggaaaaggagaggaaacgcactctgccctggagcctccagaaagaacgcagccatgtgggcaccttggttcaagtttctgtgtcacttagcttgtgggaatttgtcacagcctcaacaggaacctacagaggagtcaccttgtgtgcaggtgggatccagggtcatttacagctaaatcctgatgtaaatattgcaggttgcttttcctacttcctatctcatggccaacaaccctggacaatggcagaacacccttggaaaccacggctctgtgctttagtggagggaccagcttgtttgtgggaaggtagcacctggtccaagtgaacctacatgagatcgttactctccccagggccctcagggaagggctgagaacagctggcccaggtgtgtggaggagctgcaggtgaggcagggctggaggggcctgtgggtccaggtagaggggcagacaggttgtcccatcgccatgggagcctgcacgagctttaggttggggaaccctgctcctctgacctggacgctcctgtgtggagaggaggcttgctcagtgagatccacgccagggggtaaattgggaactgatgggaaatgaggggctagagtcctgggtagtgcctgggaggaccttgctcaaggactgaattcttggtctgttcccaccttggttactctgacaacccctctctgtgtcccacggggataaagatctcctgagcagtggccattgggacagaggagaacctggtggccagagctaagcatccaggatcctggatttggggacaggcaagctcattgctgggggacagtgatagatacggcctccagggcctgggtgaagagagcaggagggctcaggacactggaggctgtgtggaggtcacacccacgatctgtaccacccatggatgctcctgcattgctcacctttgtgtggacatcagatggccccaacttttgcactcctgagacatctcatgcattcacagagggacccaggctggggctgtgcatggccttggtctctagggtagtgtgaggacagctgagcactcagctggctgggcaggactcctgcgaatcctgccctttcctgtgtagggtccaccccagcctgactcctaaccccctactcctgtctttccagggaagagagactggggttgagataaggtggagatatttttcctgtgtgacccaggagagaatggacatggagtttcaggtgagtttctgctaagttcccatgagcagaaaaagagccaatgagaggaagtttcccctttattcagatcctttccaggtgaccccgggtgggccataggcccattcactttccctgcaagcccccgcttcctgtggtgatgggaagccttcgccttggcccacccagagcccggggcagtctgttgaggtctctatatattcagcagggacccccatcccttcctgtccccaggcctgtgtctcctcaggactcagagctggttctctggctcaggctccatgtccttccccatccccagggctgggggcttcagggacgctccatcaacccacaggagcagctcccagaggaacctaagaagccacatctgctttgtggtcgatccagcagtaaatgtttgtgtcagagtgtagcaattccagtaaaaacagagaagaggtcttgacccctgaggccttctcagaacagggtctggcatctctctctgggcccacccagggctactctgggactgaacctggctgtgctcagggggttcctgctcccaggcccctccctcctctgctcaccacctcctgttattttcactgcagtttcctgaacttcagctcagccagatgccagtggggacagatcctgggtctccctggggcccaagggaccagaatatctgtggcccccactcacctcatagatgagagcagctgccctggtgctgggtaggggaatctgggcaggggagagaggggtgtcaggggacagggaaggattcctgctgtgtaggaattccagggctctcctcaggtgatggagggtcccagggtggggttagcacagggagtggatgatcctggccctgaacagaggcccagctcatggccagggcaggtctaaccttatccaagtcattctgggtagggtgggtttgtgctggggattgacagtccccctgccctgagcctgcacagctggggccccagtggaaatgggattgggaacggacagtcttacctaggagatggagctgtcagagggtccatggcctggggacagagacaaaagtgagcacgagagtgttaggatagctgggcccctcctgcaagagtgtgtgggggtcctcagttcttagagaattggggagagggagcctttctcaggttattttaggggtcaagtaagcaagtgaggttgaggaagtgacccatgacccagagcccggaggttagggctgacccggccagttggggtttcctgtgtgatgttttatgggatcctctttgcagccccagggatagggtcagaggcccctgggtgtaactggcaggagtggacaacttggggctggcttagtagttcccagccacacccagactgaagggacactcaccgggggtggaggctgggggctgctgctccctgaagtcactctgatcgctggccctaggaaaggtcagggttatttgtgaaggtgcaaggttaaaagtcacaaattggagttaaaataggggaccaggaaaggagcctatttccaagaggggtatggagacctcctttctttatggagttctgtggtaggaggggcccaggtgaggggagttgaggaaaggccttacaaagccacatctgtcctggccagaggggaaggactctcaggcagatgctgggccaggagaacattgatccagtgacacaggaaagggactgaggacccagggaaggaatcagaccaccaggggttgcctgagaggaagggtcaaggcaccagggggaaagcagggccaggcacatgtgcaggacactgaggggactgcatgcatcttggattctcctggaactcagtgtccctgctgtgaccagacactccactcagggctggagatgctgaaatgggacaatgatcttgtcttctgtctctgccctttggcaagagacataaacgacattccaggatatgccatattggggccccggttctcccttctcacagctcagtgtctgcagttaccatgtcagtcaaaggggtgctgaccccacccagcccgtccaggctgttccagtctccactatgtgataatgcccaggatcccccctcagatgccctctcactgggtggatggattcagtgaacagggggaggtaccaggtattgagcaccgctcccccctgctccaggcagctgtggctttgctgtgctaggaaactaggaccatgctcaggggcatggccttaattggactgaattcactgaggacaaagctgttgaggaagcagcccagggtcagcagctggtgaggaaggtgccatggaatgagagggaaggatccctggggagtcgggaggctggggagagcctggcactgaatacaagacagggtctccttccttctcgcctggggtcagcgtgaaggatgggagcagaatggggaaaagctgtggtacctgccagtttttcggaggagcaggaaacacacaagtgcagccaccagaagactcccaaccaggaccccgatcaggatgcctagagtgttgtcatctgctgaaagaagaaggcaaaggggatgaggtccaaatctgttccagggggaaccatgaggggccttgcagggcaggggcatggtcagggaggaaggaaatgccatggagcctgagtgtggtctgttgtgctgtcctcatagctggctcccttgctctccgtggttgcaccattttctgtgtcttaggcttgaattactgggatgcatcaactcctacattctcccacaggaagcctgcacctcatcctgctcctgtgttttttagtccctccttcctctcacatcactcctcttccccctgtttctttttttccatcccatggcagtcgtaaagggcaggcccttgctgccaactcaatgctgatgagcagggatgatgttcattgactgttttcaggggccttccacatggaaggcacagtgggaatcaatctacctgcagcttttctcaccctcccattgccttgagggagaagggtatgtgatattgtgaaatacgtatttggtgttcatcaccattgatatggttaggctctgtatccccacccaaatctcaccttgaattgtaataatccccatgtgttatgggagggaccttgtgggaggtaattgaatcatgagggtgggttttttccatcctgttcttgtgatagtgaataagtctcaggagatcagatggtttcataaagggaagcttccctacacatgtcctcttgcctgctgccatgtaagacatgcctttcaccttccatcatgattgtgagacctctccagccatgtggaattgtgaatcaattaaacctctttcttcatacattaccaagtctcaggtatgtcttcattagcagtgtgagaatggactaatacagtaaattggtaccagctagtggagtgctgctataaagatacctgaaaatgtggaagtgactttggaactgggtaacaggcagaggttggaacagtttggagggctcagaagaagacacaggaaaaaagtttgaaacttcctagagacttgttgaatggttttgattaaaacgctgatagtgatatggacaataaagtccaagctgaggtggtctcagacagagatgaggaacttcttgggaactggaacaaaggtgactcttgttatactctagaaaagagattggtggtattttgcccctgccctagagatctgcagaactttgaacttgagggaaatgatttagggcaactggtggaaaaaaaattctaagcagcaaagtgttcaagatgtgacttgggtactgttaaaaacactcagttttatgtatttacaaaggtatggtttggaattggaacttatgtttaaaagggaagcagagcataaaagtttggaaaatttgcagcctgatgatgcaatagaaaagaaaaatccattttctgaggagaaattcaagccagctgcagaaatgtgcataaacaatgaagagcaaaatgttaatccccaagacaatggcaaaaatgtctccagggcatgtcagagaccttcctggaagccccttccatcacaggactggaggcctaggaggaaaaaatgtttcctgggccaggcccagggctcccctgctgtgtgcggcctagagacttggtgccctgcatcccagccactccagccatggctaaagagggccaaggtacagctggggccatggcttcagagggtgcaagccccaaaccttggcagcttccatgtggtgttgagcctgcaggtgcacagaagtcaaggattgaggtttgggaaccttcgcctagatttcagaggatgtatgaaaatgcttggatgtccaggtgaaagtttgctgcagaagcagagccctcatggagaacctctgctagggaagtgttgaagggaaatgtggggttggaaccccgacacagagtccctactggggcactgcctaatggagctgtgagaagaagaccacaatcctccagaccccagaatggtagatccactaacagcttgcaccatgcacctagaaaagctgcagacactcaacgccagcctatgaaagcagccaggagtggggctgtaccctgcaaagccacaggggtggagcccaaggctatgggagttcagctcttgcatcagtgtgacctggatgtgagacatggatacaaaggagatcatttcagagcattaagatttggctgccctgctggattttgggcttgcatggggcctgtagcccctttgttttggccagtttctcccatttggaatgggtgtatttacccagtgcctgtacacccattatatctaggaagtaactaagcttgcttttgattttacaggcttataggtggaagggacttgccttgtctcagatgaaactttggacttggacttttgggttaatgctggaatgagttaagactttggggaactgttggaaggcatgattagttttgaaatgtgaggacatgagatttgggaggggtcgggtggaatgacatggtttggctcttcttcacccaaatatcaccttgaattttaataatccccacgtgttgggggaaggacccagtgggaggtaactgaatcatgggggtggattcttcccatgctgttctcatgatagtgaataagtctcacaagatctgatggttttagaaaggggagttcctctacacatgccctcttgcctgccgccatgtaagacatgccttttgccttctgccatgatttcaaggcctccccagctatgtggaactgtaagtcaattaaacctcatttttaaaaaaattacccagtctcaggtatgtctttatcagcagccaagaccagctcggtcgcggagatcctaacccagcagtgctagaggaattaaagacacacatagaaatatagaggtgtgaagtgggaaatcagggttctcacaggcttcagagctgagagccccaaacagagatttacccacatatttaataacagcaaaccagtcattagcattgtttctatagatattaaattaactaaaagtatcccttatgggaaaccaagggatgggccgaattaaaggaataggttgggctagttaactgcaacaggaacacgcccttaagatgcagattgctcatgctattgtttgtggcttaagaacgcctttaagcggttttccaccctgggtgggacaggtattccttgccctcattcctgtaaacccataaccttccagcttgggcattagggccattatgaacatgttacagtgctgcagagattttgtttatgaccagttttggggccagtttatggccagattttggggggcttgctcccaacagactaatacacccattttctggtatgtgactctaaagtccttagaatcttcaaagtgatgtctttttcaagctaataattgactgatgactggcagcccctaggcaacttcagaatgaggctggtcactgacccaggtaggattagagggttgggactttcagcctcacccctaatccctggggagggacctggagtttgaattaatcaccaatgaccaatgaatcaattaatggccaatgattgaatcaattaatggccaatgattaaatcaatcatatctatgtcatgaaccccaaaaggactgggtttgaagagctgaacccatggaagtttctggagtgtggtgcatctggggagggcatggaagctccacaccccttcccacatgccatgctctgtgcatctcttcatctgcatcctttgtaaagtcctttattacaaaccggtaagcctaagtatgtgtttccctgagtcctgagagctgtttgagcaaactaatccaacccaaacagggagtcatggaaacctcaatgtgaagccagtcataagaagctctggaggcccagacttgtgactggtgggaaggtggtggcaattttgtgggactgagccctctgctgatatgtccaggtagatagtgtcaggatggaattggaggacacctagctgatgtacggtgcagaactgattggctgctgggtgtgtgggagaaacccccccgcatcacatttggtcacagaagtgtgtctgtgttgatgattgttattgtggagtgagagcagaggaaaaacacagtttgagtttttccaaacagggtggaatcccatctgccaatttagaatctgaaacttatagtttcagtacttcaattaagattgaagtacttcaattcagtacttcaattaagattcagtacttcaattaagattcagtacttcaattaagattacagaactggtaagtgaaagtgatacaacaaaaatgtaaccaaagtctgctcaacttaacagctaataacaacaaagttcataaaaataataccagtcgatattgatagcactgattgagccctggctctgtgcatgaccttgttaagggctttaatcgcattaatctctgaataaatatcctcacaaccaccctgagatccaggtgtttgtaacaattctacagatgaggaaactgaggcccaggaggttgagtgtcttgcccaaggtcaaatacctggtacctattgtaaccaggatgataactggatgagtctaatccctgagttcttacccacattgctccccaggctctgaaggaatctcatccttctcattccgtgtatcattttacaccccccctccctcctaggaaaatatacaaggaaaggagtgagaggggccgagggtcactcacattttacagtcagcttgagggggtcgctcctgttggagctgactgggttggagacctcacactgatactccccagcgtcctcctgcctgatggggtctatggtgagcatatggttaaaccaggacagcttcatcctcttcgtgacctgcagacgctggttgttgaaaatccactggaaagaggttccagtgttatttgtgtggcaggtcaggaccacggagcccttctctgtgactgtggtgctgctggcttggatggagggctgagccactgactctgtggatagagtgaccaacagaaagtgtcttggggccatgctgcatcctcagagatctcagagtcaaatttagaacattctcctgtgaataaaggagaaagatgaaggacagggaggagcagagagaaccagagacacccatagcagcgagcagtagggactacagtgacctcagagaccccagggaccaggaggacccagctgcctcagaccaggaccagggagccctgaaaaccctcccacagatgagcggccccagagtcacatgagatgcaatacctggggtggctttaggagcaggcagtcagagaaatggaacatgggtctcagcccctaagggacaaggaagaggtgtggccagctcctcctaggatcctacatccaggacccagtctgtaaagaggttatgattattcctttcttttttcattaattccctccctccttcatcagagaactactgagtgtgtgtctcagttgggccttgtgcaggtacagggtgtagtgggaagagaaagctgagtcctttccttcatcctcccatgggagtgacatcaacaaatcaagaaattcatgatttcacgtccagtgagggaagaaatgtggatctgatgggagaggcttggacaatcctggcattgagtctgatagttgagacaggtgatttcgttctaagtaaaaactgactaattctccatttgcccgtcattcctcagaccagaatctccctctctgagctgaggatgcccaagaagaaaggagctgaaccaacatctggtcctggggtccacagatgccccacggtggtggccacgaccagattctgggctgcagacacacggtggtgtgacgttgagcactgacagcctgtgtgatgctgatgcaatttctctttaataaaatggggtaaatgtcaatggtccctggcttgccatcctctctgtaaattaacattaaaatatttacaattacctgacctaaagcttggcacagaatagctccaaataaacatcatctattattattttactccaaaaaaaaaaaaaaaagagttctctgggcctgattcctggtggagaaggagcggtccagagtgtcttttctctgctttccctcctcctgaggacagtgcacttcccgggacatcttttaagtttcccatccagtttaatggcctgggaagtttgtttgtctgtcctctccactctgactctcaggtgaaagatgaggctctgcccttgcccagatggggctctgggggctgagccctgcctggtgaccagctctaggaaccacggccctgggacagctggtaaatcgttgctcacaatcagccctgcccaggaagccacaacccagccctggcacaggctccccagggtcatctggagtcaggatcttgggacaggggcctggggcaggggcttgaagggctgagcttctctcagaggatcctcaggccaggccctgactgagtcctataagatctttctcaggtcatgtctatgaggaggaggccaagcggggttggactgagactgattttcccccgctgcatctcccgcatcagactatccttcttgctgtagggaatttccacggagtccggataagggaaaggaattctgatctgttatagtttgtctcccctgggtgtgtcctgcactaaatgcccaaaccccaacatgggacgtaatgcagagggggatgcaggcacagcccaggcctgacaatcctgcgtatgtgaagcagaactgacccccaacacccagaggcacggaggaatcactcaccgtatacacggagatggtgagatgcctgttcaatctgagaatttctgtatgtgacttgtagggtgtagtatcccgtgtcctctagggtgacgttctggaaatgcagatctccactgggtgatattgtctctcgaccgctgtatgcaggccctggagtcctaacgtgagtgtctattacatatgctgcgattagctggttgggctccaccgttttccctttgtaccagccatagctgtaaagattctcgggcagataaaccacagagagatgaacattctccccttcagcaacttcaaagggcgctgatgcaataaagagccaggcagtggtgggtgcgttccagaaagttaaaagtgaggctaggaaagggagagaatatcagtcaatatttgacctatgcattggcatggaaagacggggtcctgggtgcaggtctcttcacccctcagccttagagggtgtgtgtgtgtgtgtgtgtcctactgggtcaaagtcagcagcatgaccctcattccttcagtacctctgaccttggcatttccttgtgtgaaccctctttcccaggggtctgcatggttccctccccactgccttcagttcctactcacacaagggaatccctgggagacttctttcgtgaagcctcctctagagaccctgggtcttccctttctgacctttcccagctctgttccctccagggctcttgtcagcacctgacctcacattctagatctctttgggtgtctgtcttcccccccatgagattgtgagctctgtgagggcatggacttgagtgatgttagttgcaccccagtgcctgggacaggctgcagactcctgtggatgagttcatgagcgttcccagggccttccatatcctggggtttatttgctaatgtctgaggttggcagatgaagacagagtttcatgccctggtggtgtttttatttaaattgtcactgtgatatagttttactatcattttcaaaatgtagtggccactgacaatgaacttgaaaacatggaccaactgagattgttttgccccttggcaattccagttcacttagattttttggttctccttagacgctctctcccctgagtctctaacaaaagccctctgtctcctctcagagccccatcctccccaggagaccccagccagtctctgtgctccctcctcccacccactcccagggagtcctcccctcacctgtgagcaagagcccctgccaggggatgcattctctgtggggacaagctgaggggggccccatggtctctgctgcctgctctgtcctcctctgtggagaggagcttgggctccaggaacgctctagacagggttactgtgactgttgtctctgctgtccttccttcctctatgctgagcttcctctcaggcaggagcacttcccgtttatgggcaagggcggggctctgcctacaatgtctctctgtcccctcccctctcagtcctgcctcccttgtccctcctttctccttcctttttgcctatatttggttccctaggcaaaactttgagaagcaacgctgatggggtcctcataacaggacgacccactctccccagtactgacctctgctgtgttctggccttggttctgtcacagccggtagattatttccctttgtgacacacaaaaccagctgggccctgggtctcctcatgctctccagtgctccaggaaggcagaatgatgcccagcaggaaagtgacagaggtggctctgggggctagaaaggggctcactgggtgatggctgggaaggacccacccgctatcttcagtgtcaccagcctggcctctgacccagggacagagacccaggcctggaggtctcgggaggatccccagctcctaggtgtggagggaggtgtcctgtgtgtcctgggaagagaggactttgatggaaggaggtgggaggctctgggttctgctgtccttggtgaaggtttcagggggaccctctccatgtctggggtctgtgcccccagcttaactctcattctctttgcaaatacatatattttgtggatctgcagttgcctgaactgtctcatgtccctaaatctttgtatccctttttacagaaggtcaggaagggtgtgtacatgagtatgaggactatctgatcagggcgagtgtttgtttcccaaagatctctttagatatggtataatacataagataaatgtactgaattagcaattttaagtgtagaattaaatgatactaattctattcacaatgttgtacaaccatcaccataattttttaccagaaaatcttcattataccaaatggaaacttcatacttttaatcaataactccccacttccccctgccccacccactggtagcctctgatactatcaatctctgtgaatttgcctagtttacatgtctcatataataaggaattatatacgtgtattatttttttctggattatttctcttagggtaacacttttaagattcatccacgtcgtagcatatattacagcttctttcctatttatggctgagtaatatcccaatatatgtttatacctcaattttaattcattcatctcttaatggacatgtgggtggtttccacatttttgctattgtgaaaaccgctgcaatgaacttacacttggaagtatctgtttgggtttctgtgttcatttctttgggggtacatataggagtataaatatggggtcatgtggtagttctatgtttaagtttttgagaaacagccaaactgttttccagtttgctgtgctattttatattcccatcagcaatatacgagggttccattttctctacattcttgtaaacacttactatttaatattttttaaaacttatagccattctagtaggtgtgaagtgatagctcattgcagttttgattttcatttccctggtggctgatgaagttgagcattttttcatgtatttactgacaattttaatattttttagagaactatttattcaaatcatttgctgtttaaaaaaaatgggttatctttttattattcagttgtaatagttctttatatattttagatacaagtcccttatggggtacatgatttgcaaaatttttctcatattctgtgtcttctcactttcttcatggtgttctttgaagcacaaacatttttaactttgatgaagttcacttatctatttttaattttgttacttatgctcttgatgtcatattgaagaaaccattgcccaatccaagatcattaagttttactcctatatgttcttctaatggtttgataagttttgctattccatttaggtttttgaaacattttgagttaacttttgtatgggctgtgaggtaggggtctaactacactatctcgcatgtggttatccagttgttccagcacaatatgaagaggctaccattctttccccattgaggaatcttggcacccatgtcaaaaaccaatgggctgtaatggtgagggtttatttctggactcttgattctattccattgatctctatgtgcattcttgtgccagaagcacactgttttaatgattgtagtgttttagtaagttttcaaattaggaagtgagtcctccaatttttttttccagattgttttggccattctggggtgacttttaaaaaagatgtagttcaatggttctcaaagcaggagtggttcagctctccttttttggcagtctggagacctttttaggaccttaatctaagtagataaattattcccactttcttttctgagttgctatgttacagtgtatattgacacccatgaaataattgagagaccctggaagtgcttgcctacatagtgagggacaattagttccatgatcatgggcacagaagattttgttttgggaaacaattttgttggtggagttatattcatgcttactcttttatttgtcttcatagcctgcatctccttcagacttcatatctgtttattttcttgtttgtcctctggggtttgggtgttgggtgaccagtcagctggagctggaggaggtgcttagcaaggcagtgaccctggttgggaggagcagggctcagcagggtgaaagtagctgggccttgagtcaggagtggcatctggaaggcctgactgtaagggtcagaagggccagcaggtgggtgtcctaggcacaaacggtggctgctgctgtggactggaggaaggtaagaggccccgagtattccatgttcttactggctccccaactgaggattcctctcctgggctggtgctgtcctgcagcagggaggggttagacagggacggctgcacatcaggccggagtccatgtcatcctcttaggcactgtcactacagattgaggattctgttcataagccaagcctttgcacaaggaagggacccgggctctcaaggaagagcagctcctggtcagacctccatctccttctctctcattgcctgaggcctcaagcttggtctacctggcacaggggtctggatcctcctcccagggttggggtcttactgagctgggcacctgcaggtgggagaagatctggaggggccccatctgccttcaccagattgatgttgagggtccctgagtcctgcaccactatcaggtgctgagcaacttccagtgtcagtgacaaccaccccatggtggaagcagaaccacctcgtgagaaagcacctccaagcctcagtgcttgccatgtgtgggaatttgctggtttcagttgggggcatgttggtgggtggtcatgaattcagggccggattctatgctcacagtgcacatgctggatgtggtacagaccccaggcagggctcagtggggtggttttgggtgtgcacaggtatcttttctggaggagctggtggtgatttggctcccagaagttcctgagctctgcagactcaccaagcactcaatatttgagtgaacattgggcgagagagcagaaggtaagtgtcagggcatcggggttggtgcctctgggaagaggaggaacattctgggaacaaagctctcccccggcttacagggagcttcccatcgctcctgccttgaggatcagggaaactagggcctctgctcttccaggggctgcttgcaggcagtttgctctgggagggggtgacccaggagttgcctctcattttgcatttgagatttaaaaggagaagggacagtatatcttgccaggtcacaaaaattacaggcatcatattgactgaagggcactcctgtcatcactgcaatataccagaatggtcttttaaaaaaataagtgatttaggtttaccagcaactgtaatgcttgttttattcttctagttcaccgttaatgtcacttttgtagttttagcactggcaatgttgattttatgttgactctgatgattttaagctttcatttgttcacatagagatcatcttctttctgaatattaatgcattttttctctatttctactggttattcctgtacatagagtagagaatcacttttcccaaggaggtggaaagcttctgactaccaaaaaaaaaaaaaagtgtcaaaatgctttaaagtcagtaacttaaagatcaaatccaagagtgggcaacagattctgcccagggtctgaaaggtggagaggtgactggtgaggatgtttaaaagacctctcctctctactccctaaatgggggccatccagtgttcttgaggttcagagaaggcccagggctggggcagcagggcactgtcagctcccagctcccaggggccaggagtaagaccccaacactgtccagacactgattgcattcattttgggggagagtagattcttatttaaagaataatacaaaagtctacaaatatgaacataaacagaaattcctttgctacaattttccccttaataagacattccttcctaatgacatatgtgactgcattcatggctgagatgttttctaggatggtgagagcatcagagtggactatctggtgccttggggtcatgcattttcttcttccaatgtctacaggatcccccatgtcccactttgtagtgtaactcagtgtgtgtcattctggtttttgttgtatagatccttggaaagcccatgtcattcctgctgtgaggtacaggcagccaaatggcatcatctctaaacatgccttctcctggtacatcaaattatggaataaatgaaagccattttgacagatattgaagatataagtttctactcttcccacacatgcttctcccaagtgaaggattttactggtgaattgttattagagattagtgtggatcagtgactctgccaggggaaattttgccctctaggggacatttggcaaagtctggaaacattgttggttgtcagagctgggggagggagtcctgctggcattgagtgggtggatggtgctgaacaccctgcagttcacagagccccaccagtttgaccacccaaatgtcaatgctgaggagtggagagccctgctgtgccctcccgcagcttccctgaagcttcccctcacctgctcctcccatgtctccccaccacttccccacttcacccgcctccttacacctcagtcccctccacctgaactcaccccttagtccaaggccagccctgatctccgctctcctggtctccttgctccttagcaggaggcgcccactagatggcgcccttgcccttactggagctcaccgtctccctttccaccctgagacaaatgtggctgcttttactgccacaaccccagccctccacactctagatttgctcagggagcagctcctggacagacctcagggaccccagggaggagcctcactctggagattttgatggcatggtctttgaacttcactgttacccccagtcaggatccaggatgttgggagtgcatgattctgcccggtcccacttcagcaggaccccactgctgagttgtctgtggggacccgggcctctcatctccttcttgcattgcaggagagggatcttagcactgctttcacataaagtcagataatggaggagtgcaggtgagtttgggaaggtggacatgaagagaggttgtgtccctagaggtggcagcagtgagaggatgggcaggtgggaggaacacagcccatccagggttgccagccatattaggagcgacagcctttcctctaagcctccagcctttttcctgaaacattccagaactttccacttcagcacttcccactgaggctcctcaggtctgtccctgagctcccagctgagcctacctacccatctgaaatcctgagtcctgtgtcaccctcgttccccattattctgtgcagttctgtgggacgcccagctctcctgacacccccagtcttcagaatggccatcagcgctgtcgctgtggcaccagggtgactgccgcctggaggctgagtcctggcttcctgacagctgtggggcccgctctaggctcccttgtcctgatcattcatcacctccaggatgcacagcagctgggccagggggaggagcagggacaggtgtcagccaccctgtgtgtctgcaagtcaggctgggggtgtgggaggacgccaggaatgactgaactttctgatttagagggtgagagcttgcactgatggaatttgggatttaataggaaaagcatagcgttttcctattttgtaggcagggtggctggagtttggaatcatagattcccctgggatgtcactgtggacctcagtcccacccgttaggggcacagatttcagaatccacaccctggggcaaagcaggcatgggaggctccatcagcctggccagggctctctatttgtgcagctgctgcaaggagatgtgcactctgatgggaacagtgctccctcctccttggggggcagtatctagctccctgcagcccctctccctgcaggccctgccctctctgaacctcaccttccccaacccgccccccgcaatcccatctcagctgtaatcccaacactttctcatccattatgggtggactgcttgagcccaggggttcaagactatgctggctggacaatatagcgagttgttgtctctacaaaaagacaaaaattagctgtgcatggtggcatacacctgtagtcccagtcactcaggaggctgaggtgggaggattgcttgagctggggaggctgagttggcagtgagttgagattgtgccactgtatacttcagtgtaggtaacagagcgagaccctgtctcaaaaaataaaagtaaaaaaaaaaaaagaaatatggaatacattattgttaactctaatcaaccatgctatgcaatagtccaccagtaataccagtaatagccaataatgaattatctgaaaaagaatacaatttattcttagctatctactgctaaaatttttaagctatcttttatgatagctgaaacaaaagaagtaaatttaaccaaggaagtaaaagacctttataatgaaaactgtaaaacattgatgaaataaattgaaaaagacacacgcacaaatagaagatattccatgttcatgaattggaagaactgatattgctaaaatgtccttaccacccaaagtggtctacagattcaatgcaatttctgtcaaaacaccaatgatattcttcgaagaagtagaagatcctaaaattagaaaccacaaaaattcctaaaacctgcacaaaacaccctgagttgccaaagcaatcttaaacaaatagaacaaagctagtggcattacacttcctgacaatcaaagcatactgcaaagctatagtaaccaaatcagcatggtcctggcataaaaacaagcacatagatcaatgaaacagaataaaaatcccagaaataaacccatgcatctctagctaactgattttcagccaaggagccacatgcacacaatggggaaaggacagcctcttcaataagtggtgctggggaattggatattcatatgcagaagaatgaacctagaccctatccctcaccatgcacaaaaaattaactcaaaatgtattaaataaagacttaaatgtaagaactgaaactatgaaactactagaagaaaatatagggggaaaatccatgacattggtctaggcaaagagtttttggataaaatctcaacagcataagcaacaaaaccaaatataaacaaacgggatttcatcaaactaaaaagcttttatacagcaaagaaaaaaaaggccagcagagcaaagagacaacctacaaatgggaggagaatatatttgtaaatatatacatatatatttgtaaatatatacatctgataagaagataatatccaaaatatataagaaaattatgtttctgtatagttttatctgactgggatacagaggccacatccacagtcccatcctcaaaggccacttgttcccaaaatgtcaagcacatccctcaatgatccatcatcaacacctatgtctgtaggatgaagggtgaatcatgaagcactaaaaaggaagaaggaagccaatcccaaaacaaaatgatgcagggtctggaaagtccaaagcattttttttttttttttactgcatcttcctcctttcttctccacattcccaatcctcactattgattaacaaaacaaaaaaaactgggacccaccatcttccctactgtcaggagatctagcgagattgtttgagtcttagaccaaactttgccataagccaaatttctggctgactttacaatgatatgagctagcacagtctctttttctgccagtcaacttgtgctcggttttatttgcaaccaaatagaggtggtaaccaaatataggtgaccctaaaattagtcatcaggatgaaatcctaaaatgtgcaacaaactgggttgaattcaggattagtagcaacatctctgttgtgggcttgaaaagggggcacccttttatgcagtagcaaaattgctaaattgttgtttgctgagtctttggactctcatcccggattttctatgaccattcaaacagggctgcaatgaacatctatggttgtttagcttggcacacttctacatttctatatagtaatatctagaagtgcatttgctcaatcacaagatatgcacattttataattgactgctatcgaactaccttaaatagccttaatttgttctcaacattgtttaacagggtctgtttaatgtcctacgtccagcaaggacagtatcacttttcttaatatttttcaaattattggaccttaacaaatacttaatgtgcaattaattgattcctttgtattcccatgccttcttttatatgtttccttatagtacacaaaaccacattattgtttctttacttgtgtcattccaccctggaccattcctatctaaactataacattatgagagagagagagagagaaaacaatatgaaaatataaattgattaatcaaaaaaatttaaataggacaaatcaggaagacacaagagagattttaaaattattcagagaataccacaatagctgtaccaatatattttaaaacttagatgaaacggacaactatctcgataaatgtaaattaccaaaactgactcatgaaaaaatggatattatgaatagagcaataatcagtaaagcaattaaaaagacagttgataatttttatttactgacaacaataacaaaatttcaggtcctgatatttttatggtgaattttaacaaattttcaagctcctcctcaaccaattctcagaaggtttaaaactttaacaagaaaacactttctaacacattttcagaagctgttatagcatgataccaaaaccacacaagaaaattatagaccaatctcacttacaaatatacatgcaaaatcaaacaaaatcttagtgaaccaaattcagaattaataatagcaaacaagcaaaatatgttatcatacgtatggcttatatcaggaatgcaagtatgtttcaacatcagaaaatacttctccacattaacagactaaaggagaaaaacgcttgtttaattatctcaataggtttttagagaattttgaaaattttataaagttatgcgtattctgtaaaattgatgaaatccaaccttgatttatttttaaaaattgcctttcctatagaattataggtaaaggaaacacatgcatcctcacagagctacttcaaggctaagttacttcccataagtaacgtatcctgtaatgtgtgcttggcacatattcaatactaaacaaatatttgcaaatcctcaaaccacttctcgctcaaataacccacctttgtcttttgcctttatgttagggttgattttctcaattgtatcttggagatcctttggtgggtctttcagcaattaccctgaatttgcttttctgtttacaattttaattcctgggaactctttcttgttctctgactgcacccttttcatgagagttcagccatcaatcctccagaaccccaccccccccgcccccccaaaaagcaataaagatgtctaaaagcttccttctgggctttcgaatgatgtttaccccaggcatttgttctattcgttcatcacccattttccctacaacttgcctacacttgatatcagatttttatttattagtcacctatcttcttcattggcccattttcctattttgccactggttgttctcaaatgtgttatgattcctggttgtacagtcaagtggttgataatcttggatatacgataaagatttgctctgtagctgtgtgtaagcctatataaaagcttttgtatttttcttcttaaaaaagacaaaagatggttgggaagatccctccagttcaccagttcgaggctgcagtgagctatgatagcgccgctgctctagcctgtctgtctgtgaaaaacaaggggggcggggggcgggggggaagactggagatgtaaatctcccgcagggccctacccgtatccgcaacaggtctctaacaggaacagcctcaggcctgtgttggaacaaggtaggttacagaaatctggaagccagatctgtaacttcagggtaaggactggctctcagggctgatcccccgggctgggtgtcccagaggcacccgcccccgccccttccccaaggcaggccaggacaccttcactcctctccttaggctccccacccccttctcctccccactgtgcctcctggagtagcggtggcggtgccacaggggagcggggcggggcgggctctgagggcaagggggatgggccccgccggggtcactggcggccaccctggaaactcgacgcaggccggcccttctagtgaatcgtcccagccacagctggcctcccagccgcgcttggggcgcctcggggcgcgaatggtgcaggttggggagactcaccacgcaccgtcgggggtcggtccggttattcctcaccgctcggctccagtgggcgcgcgggcctctcctcctcagttcctgcgctgcagtccctccctcacccttcgcagcttgggaatccaactgtgtcattccgacggagcgccgtgaggacctccgagggtgttagcgccaagtgatctctgtccagcgctctgaatatccaagtaaaggagttcaatgaagggcgggtcaacggaggagaaaccgtgactctctcaagggagcccaaggcctccttgtctaattagtgacgcgccaatggatggaggctcttcccaccatctcttcccagcatccagtgacaccaccgccaagggacgggctcggcggaacctgcaggaaagaagcatcggctgagcctgactgcagcgctgtgaagagacaggggaggggatcagtagttggtcccgcgcccaccccctgtttccgcgaggggcggagttgactggccatgcaggcagagggcgaaatgtgaaattccactactcctaccgtttttccctgacccgatggggcggagtgtcgtcaggctaagttccctggcggtaaggtggggagattgaggcgcacacctgccgaacggtaacgcaggattagctaaggcgagctcaggacagaagcctcccgaggagcaggagggcaaaataataaataaataaataaataataaataactcactccttggtctttatttgcggcaggaattcagaaggtgaaagcggggccttaggatctttctgaccttttgggttttaagcaggaggtgtcagaaatgttaccacagggctagctggcttgtggccagcaagcgttcacaatgccctcgatttttcatccctctctgtgggttctttttttcattgtaaggcagaatttctacgattgctcacccactcagagaacctgagctggtttagaccaggtgagacaggctaggtttaccctggtgatgatgtgttgttgccatggcgatcctgcccagtaccagaggccctgcagattcagatgcttggtgcctgtgcttggctgaggggccaatgggtgaagctgccatctgcgggatgatgactgaagcctctaagtcagaatccgcccaggctgagccttagggcagctccatggagcctcggctggcctgggatagagagtccaccactgtgccagcccccagccactgcctaggtcctgtgctgagagccccttgtccagggaaatggcgtccagtggaaaagggaccacccccttgcccttcactcaaggcaggttggtgacaaccctgaagctaatccgttcctagaggagctgcttctgggtccgagttttctctgcagcagagcagctccctggatgggatctgttcaaagtccgcctttcacgcggaattttccgtccttgcaattttccacctccaccactaggggatcctctctgaccgcctcatgccggctctggcctctgagcaggggtttctcttctgcatgtgcgaccttgcgcatgcctagtggccttttgggacctagagctgctccacaccccgatggggttacagagtgcctcgcctccactccaccccaccagggttccttccctggctgggatgggatttcagaagcgccgaggaacagcccagacaggtgtgggagagtagccaaggcccctgtcccggggtggccaggacagcggtggcctcgcataggacctggctgggctgctgcaatcagtgtcctgccccttggagagcaacagtgaaaacaacaagactatcttcacccaccttaagaaagaacagaaccagtatccccaactctgctgtgtatcccaacccaattccattccccaccccactctcagtagccaatatgcaaaatattagaatactcttactgttattattttcaaccacactctgcatcctgaaaaaccatatatttcgttatgtgcttttaaacttcttgaaaatgaaatactgaggctgggcgcagtggctgacacctgtaatcccagcacttcgggaggcggaggcaggcggatcacgaggtcaggagatcgagaccatcctggctaacacagtgaaaccccatctctactaaaaatacaaaaaattagccgggcgtggtggcgggcgcctgtagtcccagctacttgggaggctgaggcaggagaacggcgtgaacccgggaggtggagcttgcactgagccgagatcgcgccactgcactccagcctgggcgacagcgccagactctgtctccaaaaaaaaaaagaaaaaagaaatactgaattttcaaatacttgctttttttttcggtcaaaattatgttctcaaatttcactcctgtagatgtgcgtggctggctgtagtttttgcatttttattattaggtattctcctgttgcattaatatgccacattttatttctctcatgtttttggtgaccacttggggtgttttttggttttgtatttttgctgtatacatgctgccatggtggacatacctctttatacatatttcctgttgtatgcagacacaattttaggatgtgacatcttcagcttttctattgtgtcgtgtgtcttttccttcgtgctttgtgttatttacatattctggacacagattctttgtcaactgtatgtgctgcacatctctttcccagtttgtgtcttcttcttcttttttttttcttaaaaaaaactttctttatagtgttttttttttctttctttctttgttttgttttgtttttttgagatggagtcttgctctgtcacctaggctgaagtgcactggccgatctcggctcactgcaacctccgtctcctgggttcaagtgattctcctgcctcagcttcccaagtagctgggattacaggtgcctgtcaccacacccagctaatttttgtatttttagtacagatggggtttcaccatgtttgtcaggctggtctcgaactcctgacctcaggtgatccaccctctttggcctcccaaagtgttgggattacaggcgtgagccacagcacctggcctgtgttctttcttaagtagatgttacttttaatataatagaatgtatcatattttgcttttatattagtactttttctatctaattcaaacacatccccaagggtctttgtgtgtagactgaccaatttctcaagaatcatgaatgaatactgcttctctttccccaatttatctgtaatgctacctttattataaagtttctatgcatgtgtagaaatagttcctgatttttcactctgtgccaccagcataccaatagcacgctgtcttaaatattaaatagcagagctttatgagacaacttgatgtgcagtaggcaattgcccccttgttactcttcttcagggttctttgttgtaccacatgaattttagaattggcttgtccagctaaaagacaactgcaaggattttatttggaagttcataattctatacataatttggggaaagtattttcataataccaagtcttcctattaatgaacacagactctctctctctctcccccacccccacctgtttagttatttatatctttatggtctgttagttattgtttattgtctttcaaccaggtttcatgtttttctacatagaggccttgcatgtgaaagtctttcttcctagcttgctattacaaattttttttaattgcactttttgggtacagtggcttgtactgtaatccccgatacctgggaggctgaggcagatggattgcttgagtccagaagttcaagaccagcctgggcaacataatgaggtccctgtctcaaaaagtttgttttaaaaattgcatttgctgttattcaacaaatgtcattgtgtctcatatatggatttttatatctgataaccttgttcaacaatcttttgattctaacaatatatcagattcttttgagttttccatatagacaataatgtcatctgtaaattataattgtttcttctttgttatttcttggaccttttattttatatttttgtcttgctgcaaggcaatatccctctatatattgtggggtcttttttctcataaagtggggatggtgaacacccttgtcttgctctctgattgtataaagcatgctttctgtagcattttgtagacgctcttttttagattgaggtaattcacttttatttctggtttactgagtttttagcataaattcaggctgaatttgagctaaagctttttctggagacatcatttgaaaaattcatatgatttactttctttaagtcaccaaagttatgatttacattgaactgagtttctactgtttaactgtattcttgggagaaaacccacttgtcactgaacaatatctgttttatttactgctgtcttgtgtctaaattttcttttaggattttttgtatatgctcagattagcctgttattctcctttctgtatttttttctggtttgggggtcaaagttataatagcctcacaataagagctaagaaaccagccctaatggaggccggggcaggaggtttggagttcaagaccagtctgggcaaaatagtgagacccccatctctatgaaaaatagaaattagccaggcatggcagtgagtacctgtagtcctaggtacttgggagggtgaggcaggaggattgcttgagcctaggaatttgaggctgcagcgaactatgattgtgccactgtactccagcctggatgacagagcgagaccctgtctcaaaagaaaaaaaaagaagaaataaaaaggaaaagataaaagagctaagcatctgtttccttttttccattttctgggagagtatgtgtaagactgtaattaactgtttcttgaataatgggagaactctgtaaaataatctggctttggtgttacctgtattggaaggatgaaaaataccaattcagtttcattattggttgatagggctactcatgctttttgttttgttttgttttgttttgtttttgagaggaagtctctctgtattgccctgttgtccaggctgagatgcaacgttgttcacaggcctgatcctggctcactacagcttctaacttccgatctcaatagatcctcccgcctcagccttcccagtagctaggactacaagcatgcagcatcacatccagcctcttttcctgcctgacccagttctggtttcctttagttttctaggtgttcatccattttatctaatgtttaatgcatttggcataagggtgctcagtgtcctttcattgtctgttgtctgtaactgttgccattttcattcctatttatgagtactggcgtcttctctcactttttcttaataatcctgctggaactttgctttttaaagaacatcttttgacttgttgattcttttttcatacatattaactattttcttattttttgcctttatatttatttcttttcctgtttgaaacattgctcttttcttactataaaaatgggtaagtagctcatgaattaccacctcttttaaaaatcttttctactgtaagcattttagcagtttacatttgcccacaagtaccacttcagctacaccctatgtgcttttacataaagtcttcatttttggtaagacatattctcaaattttaattatcacttgtttttaaatccatgatgttttatttgaaatgttgtttctaaagatacattttctggttatacttttattcttctaatttagcacagtggccacaaaacatggtctgtgcagtgcatacaatcgatgagtaatttctgagctgtagtatttggcataatatatggcaaaatttcctaagttttccatgtgtgctttaaaaaacttccagtaaaatacataaatctgttagatcaagcttctcacattgttcaaatagtctatatgtttactgattcatttgactgcttgatttatcaattacaggtaggaatgtattcaaatctcctattaaagtgtgacactcaagtggctttttaaagacagagatgccaaaccaatgaatacatgattttccccaaagcctgcacaaattctctaatgaaattttaccatgaaagtttgtttaattaaggcttactaaagcagtatgttgtcttttactttttaaacagagaatatatattttaatacatcgtttaagtttatgattaattatctattactgaggataagaatctttgcctgtgctcattcagcatttgcacttcatttatgatctgccttctcatagcttctgttaatttttatactagagacatttatttgtttgtataaatgttgaaggtttttttttgttgttgttgtttttgagtcagagcctcgctctgtcacccaggctggagtgcagtggcatgatctcggctcactgcagcctccatctcctgggttaaagtgattctcctgcctcagcctccagagtagctgggactacaggcatgtgccaccaagcaaggctaatattttgtatttttagtagagatggggtttcgtcctgttagccagggtggtctcgatctcctgacctcatgatctacctgcctcggcctcccaaagtgctaggattacaggtgtgagccaccgtgcccagctgggttttttatattataaggagatgtaatagatagatagatgtttcaaagatagtcaaatgtttttaaaatttaaaacacttttttacaggttgactttcaccatttaatttcatctatgtgttttgccttagagaaattttaaatgctatgtagatctcatgacttataattatgaagcattttgttttctgttttccacgaaacttagcttaactttgagcatataatagttgtaaaggtaggagagtaacactgaaaaaaggaattgcataaaaatggcacattttctgtagagttgtttatcgcctgaaaataggccccatttcatggaagtaagatgatcaggctcaggtccccagacgaaactcttggcatggtttttggagatagtccagggctcagtactggctctatcatttgctacttctcccaaagtaaccaatatctcatccaccctgagcccatttccatatctctaacatgaggataatagcatctaccttacacaccaagtagagggatcaaatgtaggaactaaatcaaagtaccagcactgaataacctacatcctcccacttcccaaaaggaagagagatgtatcccctgttgacaaacgagaccattttgcaggagagaaaggaaatgccagttcacttgcaatgtaaacatgctctctctttttagggatgtccagggacctgagagagaacccatgcttaccaaagagtttctagttccagacacacaggactcgaagggtgacaagtatggttttcagggtccctgaatccacccagtcctcacagaaactcctaaaagctgtcgattgacagcgttgagttcacagctctggtcctcacatgctgatactgcttgtgatatcgaacccgacaggaccccacatcacaattgatttaccaactacaatataatacctcctgaatctccaaattggctcacccaggaacaaaggcttggggtaaaactggattaggagatataagctctgaattttctgagggtgagacacacaaggattctaagtgacacgccacagagtaacgggtctgtgactggaggacccacagatttgtcttactggagacaccacatgcacacaaactccatccttagctgtggaaacaagggtcttttgctatcttagccgaattctgggagtaatttttggaggggaggagatctttgggattgcctctttcaggccctttacaaaaatacctacttcttaaatggtaaagcttacactaaactgaaaaaattacatccttggctttttatgaagtaggtgttggattgaatcactactggaagaagtatggcatcgcaaattctaagcagtggtcaaaggatggatctgttaaattagaaaaatctctaaatttataaaaagattttagattcctttattctaaacaattgacctatttgtactcatgggacaatcaaatttcaaaggagatatgtaacgatttcatggcttgcattaaaaatccttctgataaaattaaagataaaaaatctgaccccctgccaaaaaaatcttttgaagttcatactgcctgctttcaatattctgtgggattcacaatgaaaggtgccttatattgtggcctagcttcaagtttatgccttcgccaccatggcctgggttcaattcccagtcagggccccagcgcctttggtttaatgtttgcgtggcatttgacttttttacctatttagtattggtgagattacctttggtaaaaaaaagtttaaagagtggaaatcgcaattctttgtgttggctaaaatctgattataagagatctggaaggttttatttttctttttcaaagagctctatggtcagaagtcggcttcatgaaaagctaatatttaattatatgtacatacagtctttctggattttctcttttgcctcctgttttgaaaaatatttggatttgagtgaaactccgttttagaaattaattgcttggtacaatatacccatgtaactaccctgcacatgtaccccctgaatctataataagagttgaaattttgacaaaataaaattagattttgaattaaaacaaataggtgcttggttcctctgctcacttctttttaaaaggaattcctctcccatgtacttcttcttttcccttctttaccttccttttggcatctttggtatcacatgaagggatctagagggaattttaagtgactctgaaattccttgagaaatacacaaaaagatcccactcaccccttttgggggtctcctgttctccttgtggagtccagagtcagggacaggctcctccaggtctgcagctctgctctcttttatttcatcttggctgattgctttggttttgtgagtaccaggcattactttgtactgtgagagacacgtcctttgtgagtgcaacggctgctgggtcactggtgagggctgcagtttggagatggctgagagccgttgcaataaatggttgtgattgcagggggctccttgtttctttgcaagtttagatgagaaaggtgcagtttggacacagtttaaaggctgtgaaaacaccaccaatgaatatgatttcctttggggatggtctgattaaaagtgggctgattgttgctgtgctactagccttgaagacatgtttctacagcattgtgcagtgtggaaaaattgtgtggcttggtcttgtggcatgtcccttcttttagagacctcagattcaatgtgaaattcgggatttttgattttcaaagatctagatgccctgccttccagatgtgcctactcttcacatattttaaaattagatcctataaactgcaaatactttgttggcttctgtgagatcagaggtccagttagaaaaggaagacagtttgttaaaattaaaaactatttatctaatctaactagattggcctccaaatatgactttctgacattcagctggttactctgaaaagatttctaaatctcttgaggctcatctatatgtttccttgcaaagaaaaaaaaaaaaaaaaaaaagcaagcccaagcactagtaagaaaaagatttgcaatgtttcatgaaaggagtagatgagtgaagcatttatttgtagatactgggttggatacctgtgcaaagaagaagaggtcaataataaaaattgccaggggatttcttggaacttaacaagctgaattaaatatagaaatgtcaggaaatcaaggcaggaaatactcacttgtggttaggcagacagggcagggttctgagcttgagatggagcaaacagttgtggtgggtgaagttcacatgctttagagctcagctgtcctagtaaagaagcctaagagtctctaaagctcttatgagaagatggattttttttgcctagattaaaaggttaaagaattgctttaagttggataaaataaagctaaatgtttaagcaagttgtgaaaggtttatgaaaaaattaattaaaatatttttgtgtgtaaacatattgactaaagttgaaggggtataattcagcatttctgtaaattgagcattgaaataaaaacacaatgggtttctcttagagcactaacctgctctttaacaaaaattgtaaagggttatagaaagtctataaaaatgttaccttatggtcaaacattaaaattgggtaaatatgtctatcaggttttattaagaattaggtttaacattaatagtacactaatgtaaaggtgaaatttggcttatttggtacaaaaatcatacaggaagcattgtgaaatataaaatgatttttagctttctttgggctatatttctataaatatgttattgatgagggttccaaagttatgggagactcctataattctgctatatctcagtgtacattatcagtcataattataattgtcatgttaaattattgtgggccacagaggtaacagatttccttgtcaattgtgtctttgactatgactaccctaaaacgttcagtcacccatatacacatgttaccttgttttggccctctttagaaggtaattttataatcagctataaagccctaacaggtgctcttaaatgcaaattttgataactttggagattgtgacatcagaagagaggaaaaatgttcgggacacttggagagctaaaatgttcattgatatcaagcaggacaggaattaactgcatgaagtgaactaataggaggctgaagtgatctttttgactttttgcttaaaacgttgctgatcctttgttttgcttttcagagtcaaggcaaattttcttttgagctattgacagcttttaacgattaatcaaaatatactcctatgaacaccatttggagcattatttgtttctctctacccgatttccccagaatttggaaactatttgtgggtattcttaatttatggcaatatagttatttgcataagtgcaataagaatgtgttttctttggtaacaggacacaatttgaaaaactggttattttaccaaggttttgaccagaatgctgtgctttcctttaaggaatcaaacttgacttgtggagctaataaagcctttggaaaactgaccttatatcctgtgaacacagtccctgtacagggttactgatctgtgggaagaaaagaatgtcacattctgacaggtcaggaatcccaagttatcttgaaacttcaagaggacaggaattcacccaaccatatgtatttgatggtagaaatccatggcaggggctcagctttaaaaagtcttatctcagattccttctataaaacaaagtcccattaaaaccaattttaaaagcctatgtgaaaaataattattcttgctgcacctcgtacaaataaagtggcaaagcataataaagcaaattggtcctgtcgtaatttgtctttagtaaaaacgggaaactggggtcgggtgcagtggctcactcctgtaatcccagcactttgggaggctgaggtgggcagatcatctgaggtcaggagttcaagaccagcctggccaacatggtgaaaccccatctctacaaaaatacaaaaatgagccgggcatgatggcgggtgcctgtaatcccagctactcaaggggctgaggcagggaagcggaggttacagtgagtcaagatcgtgccacttcacgacagcctgggtgacagagcaagactccatctcaacaacaacaacaaaaaagggtaactggagagagggaagttatgtttcaaaaacttttggaaactatagtacacctgtttttaaattctagtctggcattcagtttttattattttctacagtttgggttaaattcgtatttctctggctacaagtctcctaaataatcttttcatttgtttcctttttctttccctttttccccatttttcttaattggaaatcactgaaacctaagctgtgctttcttaaagccctgtgaactgaagactagacaaccgaaacttctgaaggaagtagcagcaacctatttatatgtgttgctgttgcctactattatgttttagcaggtgctgcctctacacccccgaaacagagagtgctactgggaacaaatcgactttttccactccagtgctgcattcggtgccccataacgatgaccccctctcagcaggaagtagccagaaagattacaatgctccatctccctatgattcttgtgataaataaatatacaagcatgatagaaatcatgcgcaaattgacagtggggattgtggcaggccagatttcactaatggaggtccccatcacaactacttcagtactgactgagtggttaagttcagtatcaaaagctgaaagtgccagcgcctttctacaaaggctagaatgtaacaaaagcccaccaagggttttacctaggcctttcctgggccttacagcatgacaaaacaaagaaggaattcttaaccagacctgtttaggattaaacaaatttaattgggggtctgaagaaactcgccaggcctccacaaacaagttcattgggggtctaaaggaaccccccccaaacctctgtgattgagcaggagacaaggtcagggtaattgccccagcacctggactcatttagatttaagtaaatgtactgaggctccagagaaaggtctccaagacttagactagagttacagattaaaagaagttaatcacttatatctttagataaatgcacactgacacgtagacatacatcttagaaaatatataagctctggaaaaccttgtaatttacagttggtctggagatattttctgggccttctctctgtaaccggttccagaaataaaaaactctcttcctccccagtttatctgcatctcgttattgggccgtgagaaatagcagccagaccctgagtttggtctgggaacacactggctgggcttcctgcctggcggtagagcttcactgtcctccttcccagccaaaatgtggcccttgaaggcttcctccccaactgaccggttttgggttctaggtactcagggaacaccgtcttcaaggaggccattttcatactgttcctggtttgatttttctgaaattaggaaatgccccttgaggcatccaggattgtctttatttcccctgaagcttcccctcctgaagaaaaaagttctcaaacaccctcaggactcaaaccccaagttcaccctgtgaaacattcccatttcctaaacccaggcaggctcatggccctcagcctctcagaccccatggaaacctcctcccccacttcacgggttctctccatattgagagcctcccctcctcggcacacaacccagagactcaccccaacatgtgtagcaaatcaccctggaaacaatcatggctgaacgtggtagcccatgcctgtaatcccagcactttgggaggcccaggaggtggatcacctgaggtcgggagttcgagaccagcgaggccaacatggtgaaacctcgactctactaaaaatacaaagttcactgggcattgtggtgtgtacctgtaatctcaactactcaggaggctgaggcaggagaatcacttaaacctgggagacagagattgcagagagccaagatcgcaccattacactccagcctgggcaagaagagtgaaactacatctaaaaaaaaaaaaaaaaaaaggaaaaggaaaagaaaaaaaaaatcatgaggcaacattgcatttaacaatattttatttatcaaaagacacttgtctttctcaggtaagtgaaggtctagagatgaaacgagtcccgatgtaaattgccccatgggcattgctgagatcacaagatcatcactgcagcatgcagcacaatagtaaatttctcaggatggaagttcaacaatccaaaaggtagtattttttttcatgatgctcagtccatcatacgaaataaaaataaattccttttcatgatcatccattcagtagaaaaaatgatagtaaatttgttctcatgaagatttttaccgtaacatataggatttatcgttattattattattctttgttttttgtttttttgaagcggagtctcactctgttacccagtctggagtgcagtcgtgcgatctgggcacactattaacctccacctccagggttcaagcatttctcctgcctcagcttcccgagtagctgggattacaggcatgcgccaccacacccggctaattttcgtatttttactagagatggggtttcaccgcattggtcgagctggatttgagctccggacctcgggtcatccgcccatctcagcctcccaaagtgctgggattacaggcgtgagccaccgcgcccggcctcaatttatcattattcacgcatccacaaactgggttcttatattttgtacgtgattttttccattgaggagagatatctgtgcatattcatgctgctcatatttcatccacaaactcggttcatatttcatccacaaacataattttttccgttgagaagagatacttgtacatatttatgctgttcaaattcacatttcatcattcttttacaagaaatagataatgtattttaaggttttccagtggtattacagatattttactgggtgtatagatagaaattaaaccaaacttctttgttctggccgccagtcatgcatcctgttttcaacatagttcacatacaactggttgtgtaaaaatgaaattattttgtttagtacaatcatcaacagttggttgattagatttttaattatcaagttaatcattgtcattatgcttctcatcgcactcgtcattaattgctgtgggaggaaatttgttatgttccctatgagagggtgtatcacaaattcaaataagaattcaacgacaatggactgtataaaggaaataagcaagtccatggaaaacatatttttttccggaaaggattaaaatatttttaaaaaggaattaaaaaaaaattgggcacggtggcaaatgcctagagtcccagctgctcaggagatggagacagaaggattgcttgagcccaggaataagttggaggctgtagtgaacagtgattccaccactgtactccagccagggcaatagagggaaaccctctttctaaaaagacaaaaagaaacaaaacaaaacaaaaaaacaccacatcaaaaaacccaacaacaaaatgaaaaaccaaataacagcaatacaattggagctattcgatccaaagaagtaaatgaaacataaagcaaataaaagagaaaagctaatacctgtgtcctgcaggactcagtccaagttctgctctgactccctcctggtgagccaccccttaaaaagtcacttggggcggggttactttgacagacagtcttctgtcaaagagggaggcggtaaatagcacttttttttttttaatttaacgcctttccaacaaattagcggctatgttgtctaagagtgcaaatgtcagaggtgggtacaggcagcaagaccctccccacaggggcagcagaaggaggaatgactaagggaacaagactttagtgtgctcaactacacaggacaggaaacagatgctttttacaaaagctggtggacttgaaggcagaatattttcaagttcctgtaactgcgaactatgacctgtagcctgtgagagtgactttctgtggcaaaggagcttttgtgaatgtgaggaagttaattatcttaacagtgggaggttctcccggcttatctagctagaccctcgtgaaatcccaagtgtccttaggaaggggaagcagagagagatttgagtccagaagaggaagaaggtgatgtgaggcccagtaggggaacaaagggcgatggcatgtaaacacttagcccccagaagtgggagagggctggggttcatcacaccagaatccctaacaatcagccttattttaattacccttgaaatggaaggaggccttagagagccagaggcttggaggggcaccctctgctgcatacacagatcccaactgctgtgggctccaaataattgcaccagggaaatcacaaattatcaaaaataaaggatgtaaagcttttaaaaaatattaaaagcccaacaaataaaaaaagttctaaatctataaaattgacctcagtctgtatatttagatgagtcatgtgtatatagcgtttcacttcaaaatatatgataaatctctcattcattggcttaaaaataaacacttcaatcaagtctttatcagaaaaattgaaacgttaactcaattgccttttagttcatgtgactttacaaaacttaaaacaataaagtcagttttaaaaattattagtaaagtaaaagaaaaatatcttcacaatgtagacattttgtccacatgagacatgtgaaatattgccattactaaatatttgcaggtcaaaaactgtttccaaaacattttaaataatcatctggcctgtctgttttagagcattcaattctagctgaggtctggggacatgtgaaaggagccacggcccgactccgtgctgggaagagtcagacattttccacagctctgtcctttgctgtgggctctgcaactcctaccaattaaaattgcttacgtttttgttttatttttactaaagaggggttcctaaaagctaacattatactgagtatatgtaactaaaactactaagaaaacaatttcacaattatacaaatgtgccaagtaaatgaaaaaataaactgtattttaataaaggttataaaaagaaaaacatatagtggtgtgaggactgtctcaggtcttcactgagcaagggatcatgacattctatggcggacagctgaccttggctttctgctcctcttgattatgtctactaagtgacatacttactctttttccacctgtcttgcctctaagggtaacaggttttatgagatccctcctagtgctttgcaggtcagcctccctttgctgcattccaattttactgcctataccctccagctggcttttgatgacaaaagtcctggtcccagccattctcagattctgtcatccccgtgggcactatggagctcagcactatgggaggttccccaaaaatctcgttttctatgaggaatggccaccacctgcatctcagtgatgctagtgacccctttcctactcctgtgctcactggtcctcatgaagatcctggttggtctgtagccccctatttttcctattaaagagaaattacagtaagacccatttgtgtgcaaaatcaattttaggcttattacacttggcctgataatttgcataaaatgcagcaagaattcatcggccatataggctacttttgagttaattttcctgggtttttacctaaaaatatactattttggttagagtcttgtgaaaataaccaatgtgttcaattgttttattttaaaaggctcttactgaacactataaatatgtataagttgaatatacaaactatattgtcataaaatcacaacccaaaatgtggagaacgcagagggaaaggtaaatttgctcgcaaaaacatacttcacccaaataactggaaaaaaaaaaagactttcatgacccttctttaaccagagcagcagctttcaaacaaggtgtttgccttggaaatgccattcacaagccaaacggcccttgagagctgtctgtcaggcactgtagaatctagcagctcctcacagagttagaaatagtttcaggaaagagattccctgcttttagtaactgcactttatattcccagatagcgagattgtatgtaaaccatttttatcttattctggaactcttttgggtactttttttttttttttttaaatgatggagtctggctctgttgctcaggctggggtgtagtggtgcgatttcagggtatgagaaaatgcagctggacctggctctttccaggaagaccctcacagccaaggagtccaaagcctggggttttcatctaattccagtgtgactggggtaggagcagctttggtgctgggtgtgtgtgtgtgtgtgtgtgtgtgtgtgtgtgtctatgcctgtgtctgtttagggtgttaggctcgtggttgtctagatacaaatgtcccagggctcaggagccccagggttatgtcaggggcaccagatgaaggtgtcaacagaagttagggcacaagggacaaaggtgagagcaaggttagattcatttaggtgcaagaaatcatagagggaggagggagaggaagccctcctgctaccaccgaggaagaagcgcagcttaaggcagaaagcctgtccggagaggaagtgagtttgagggcagggctctctgggtaaagtacggtctgggacaccagcctgggggaagggtacagaatgcagagtggcctggcgtggggactaagaacagaggagagcagctttcactgggagggtcagtgttttcagtgtccagcactgagcaaggtgagatttgggcagcttgctgtgaaataaggtcaggctctggcattgtccccattgcgtgtgtgtgtgaggggcactttgggagagtgaactctccacctccatcctctcatacgtccttcaaccgagcttgccagttaccctgattccaaggagatctatttattgttgacaatactggatcctagcagaggctgggtaggagcctgggcacaagcaagtggaggagggggcctgggcctgaaagacctgggaggtttgagagaggacacagcccacagaatggagcagatggggtagagtcggcaagcattcagggctcctagtaagttggacaatggagaccctgaaagatccagtaaaacggggagaacaaacaggtccccaactcacatccttgcagtgcctggagcttcagactccagacaggtggggaaggaaaattgagggatgtgaacatgttggagaatgtcgtgccctgaagaatgaagaaaaggggggtgaggaatgagagcaggaacggcttccagtgcctggtgcccaggagaactcagaaaatgggtgtggtggagaggaatcgaggaaccggaagtggtggaagtgtgcagggcccctccgagatcactgtgactgccaggcgtcctccctggctggagagcttcactgtcctccttcccagccaaaatgtgtcccttgaaagcttcctccccaatggactggttctgggtcctatatatttgaaggggtggcctgcctctccacacctgtgggtatttctagttgggtgggaggagagacagagaaaagaaataagacacagagacaaagtataaagaaacaacagtgggtccaggggaccagcactcagcacaccaagggcctgcaccggcaccggcctctgagtttcctcagtttttattgattattattttcattatttcagcaaaaaggaatgtagtaggagagcagggtgataataaggagaaggtcaatgaaaaacatgtgagcaaaagaatctatatcataattaagttcaagggaaagtactatgcctggacgtgcactcaggccagatttatgtttctctccacccaaacatctcagtggagtaaagaataacaaggcagtattactgcaaacatgtctcacctcccgccacagggcagcttttctcctatctcagagttgaacaaatgtacaattgggttttacaccgagacattcagttctgaggggcaagcaggagacagtggccttcctccatctcgactgcaagaggctttcctcttttactaatccacctcagcacagaccctttatgggtgttgggctgggggacagtcaggtccttctcatcccatgaggccatatttcagactatcacatggggagaaaccttggacaataccccgctttcaagggcagaggtccctgcggctttccacagtgtattgtgcccctggtttattgagactagagaatggcaatgacctttaccaagtatactgcttgtaaatattttgttaacaaggcacatcctgcacagccctaggtcccttaaaccttgatttcatacaacacatgtttttgtgagctccaagttgggtcaaagtggctgggtcaaagtggctggggcaaagctacaaattaacaacatctcagcaaagccattgttcaaagtacaggtctttttcaaaatggagtctcttatgtctttcctttctacatggacacagtgacagtctgatctctctttcctttccctacatatattcatggaccacagtcttcaaggagtccatttcctcactgtttttggtttgatttctctgaaattaggaaatgccccattgaggcacccaggattgtctttacttcccccagagcttccactcctgaggcaggagcttctcaaacaccccccaagactcaacacctaatttcaccctctgaaaccttcccatttcttaaatccaggcagggtcatggtccttagcccctcagatgctgtggagaccttctttccctttcatacattctctcaagattaaaagccacccctcctcagcacacaccccagagactcaccccaacatgcattgcaaatcaccctggaaacagtcataagaccacactcatttaataatattttatttatcaaaagacactctttctcaggtaagtgaagttctggagaggaaaagaggagtcctgatgtaaattgccctgcaggccttgctgagatcacaaggagattgttactgcagcttgtagcacaatagtaaatttcttctctggatggaagttcaacaatccagatcgtagtatattccttttcattatgctcagtccagcaaatgtgatgataacaaattccttttcatgatcatccattcagcagagaaaatgtttgtaaatgtgttttcatgaagatgtttaccataacatacaggatttaccattatcaatgcatccacaaactctgctgttgttttttatacataattttttccatcgagaagtgatagttgtacatattcatgctgttcatatttcaaccacaaactctgctggtttttttatacgtaattttttccattgagaagtgatacttgtacatatttgtgctgttcatatttcatgtttcatcatccttttacaataaataggttatattgtattttaagtttttctaactgtagtgcagaaattgtactgggtgtatacatagatatcaaaccaaatttacttgttctggctgataatgcatcatttatttcatagattatgtatttctttgacacatttcacgtacaactaattgcataaaaatgaattttcttttagtatagacatcagcatgtgcttaattcggaatttaattgttgagttaaacatcgtcattgccttttccgttgttattaattgctctggtgggaattttgttatctcatacataagacagtgtgccacaatatctcttaaaatttcaatggcaataaactttatatttaaaaacagggaatctatggaaaacacatttttttctaaaggattaaaatatttttttaaaataattttctaaaaagttaggcacggtagcaaacgtctagagtcccagctactcaggaggctgagacaggaggattgcttaagcctacgagttgggggctgcagtgaactgtgattgcaccactacattccagccagggcaatagaagttaaccctttttctaaaaaaaaaaaaaaaagaaagaaagaaagaaaaaaagcaacaacaccaaaacctcaccaacaaaatggtaaagaaaaaaaaaacagcaatacaatgtaagctatttgatccaaagaagtcaatgaaatttaaaacaaatgaaagggaaaaagtaatacttgagtcctgcaggactcagtccaagttctgctgtgcctccctcacggtgagccacccctttagaagtcacttgggtcataagttaacccgataggaagtgtcctggccaatgaactagggaggtggtaaatggcaccattttaaatttaaattcacggccttttcaacggatcagtagccatgttgggtaagagtgcaaatgtcagaggtgaaaagaggcagcaggaccctcccctagtgcttgggcaacagaaggtggaatcactaaggggacaagactttagcatgctcaagtacacaggacagaaaacatgctttttacaaaagctggtaaatatgaagagggaacattttcaagttcctgtaaccaagaactaccgcctgtaaccggtgaaagtgactttctatggcaaaagcgtttttgaaaaggtgaggaagttaaatatcttaatgttgggaggttcttctggtttatctggctagaccctaatggaatcccaagtgtccttatggagcggggagcagagagagagatttgagtccagacgaggaagaaggtgatgtgagtctgggtgcgggacagggggagaatgatgctatgtggggatctgggctggggaatgacttagctgcatgagcggagtgacttagactcctgaactagaagaaatctagggctcatcacctcagcagccctaaccatcaaccttatttttattacaggtcttccatcgacggactccctaaaaagccagcggcgtggaggggcgccctctattggacaaatagatcttgactactttcggccctcaaatagcctgactaggcaaataacaaataataataatttttttttaaatcatggaaaatattttaaaaaacaattaaaaagttataaatctataaaatctgcttctgtctgtgtgtctgtatatttagatgtctcatgtgtacataatgtttcactaccaaaatatatgatgaaaccctcattaatcggcttagaaaactaaacacctaaatattttctcagaaaatacaaaaactttaactcaaatcccttttaattcacctgactttaaaaatctttaaaaaataaagcatgctttaaaattattagtaaagtaaaattagaacatcttcagaatttagacatttggtttaaattatacaggtcaaatactgcccttagtaaatattttcaggtcataaacaactcctgtaatcttttaaataattgaattacatgtctgttttagagctttaagttctagctaaagcctggggacaaatgaagggcaccatgccccctctctgtgctggaaagagacattttctacagctctgacccttgcagtaggctttgcaactgctacctatcaaaattgcctacatcctaagtttattattaaaaggagttgcttggagttaacattataatgaatatatgtaactaaaactatttctcatacaaagtatatgaaaaagtagaatgtatttttaataaaaagttataaaaagacatgaacatgtagtttttataaaaaacagtaattttgtctagttttgcagttctaaaaagttatgttaaattcaaaaataaaaaataacaagacaagactcaaggtttaaataagttgtaaaagatttgtaaaaattagttctataaaaattttacaaaaaaaagcattggttaaaatttaaggaattattttgtttttacagaaattaaacattcattaaaaacactctgatacaaggccttaatttgggttcatgtatcagaatagcagggttttcttagaatattaatctattctttaaaagaactatgaatgttatgcaaactttataaaaatcttaccttagagtcaaactgattaaaattccatagattttacgtaaaattttattaaaaattaacttcaacaaaaataaaatttgattttctcctttaaacaaaagttttgcgtaatattaaataataaagcatttttgtttaccttttaaactataaacacacacacacatacacatacaccaacactaaagtcagctgacctcatactgtctttattggatattcttgtttaaaaaactatcttctttggaaaataaagttttttattttaaaccatattttaaattatcattttgactaaatccataacatacagtgatctgtaataattctattttataatatcaagtgttttgaagaactccaggaacagccatgagagaacactgtggtttagtaacactttatttcctcagtttgaaaatagttgtctttcttggggaggccggtttcagcagatgaaaacaagagtcatgatgaaaattacccagcagtggttagtgtgaccataggaacattgtcatcaggtcagcagaaaacatatcagcaaatttttctcatactggcagtgtgtaggggtggatgtttacagttcctgaagccccagtggtcgtgtggtcttttagttttgccatttataggcaacttgtggtaactagctcaattagacacattccttatcacaaggacagagggctttctgtatcctagggttcttgccttggcattccagaagaatcaggtcacacgtggacgtggagaatgagtgcaaggttttattgagtggaagtagctctcagcagatgggggagccagaaaggagattggtttctccctggattggggccgttcagcagccctggctctcctctgactgccccaggcaaaatccacatcgttctataagtcggtgccctgctggtgtgctggtgcctgttgtcatgttcctcttcatgtccagccgcctgtgtgttcctccgctgatgtgctcctctcgacgtcaagcctcctgtgtgtctgactgctagggtcttggggtttttataagcacaggatgggtcttagcaggccaggatgatcttgggaaagacaacattcggtcaggaaaacaaaaatgcctgttgtcatctaggtccgtggggacaagcccaggtgtggagcttttagccagggaccacagcctcctgtatccaacacttcccttcaccttttctatatcattcaaagggatcatgcccttcccatcccagcacttcactttcatgtcatttgccccctctgaagaggtacatctaactgccattagaatatggatgatgaccagtcttagctgcttcctgctgaaagggggcattgttttgggggaaaacggcagtcagattcctcccaggggtctctataataaaagatcgaggtggctactttcaggaggtcctctaatgtactatctggtcccaagtcccatttctgcaacctcctcctgatgtcaggagctgcctgagtaataattttatcctttaggattatctgtccctcgattgaattaggagatagagaggtgtgatttaccaaggcctctcttagcctctccaggaaggcagtgggattttcatcaaatccctggttaattatggacaacttagtataattgagaggcttggtcttagacctacgtaagccctctattatgcacacctgaaagtgtctcctcttccagtcttccatctcattattgggatcccatttagggtccttcactggtgctacttctcttccagttggataatattcgctcccttccctgatgctataggtgatgcaaagctcatccccaaatctctctgctgctggcagagcagcctgcttctcagtgtctatcaggttctgactcaaaagtaacataacgtctctccaggagagttcaaatgttagggtgaaattctggaaagcttctatatatctatcagggtcatctgaacacttgcccagatctcccttaatttgctttaagtcttgtagggaaaagaggacttggaccttactgggcccaaattcactgggcatctgtaggaggggcaagagtgagactgggcttgtttgggatgaagatttctaggaggggccaggtgagaggctgaagctggatacggaggttggggtggacccagaggagcagggcttgagggagctggcacgtcagctgggggtgcgtctgggactcgtgtctttaattccctgggcttgaccctggcagccttccccgagacagcaaacaggagggctggaacaatcctacatgtcagcaaaggtctggattgctttgcaaggtatagaaagcctgcacatttggggcctcagaccatgtgtcctcacatccagagaaaagttctaattgcaggatggtattgaaatgaatggtcccttcctgaagccaagccagtccttcctgtaaaccataatttggccaaacctatgtgcggagggctatgagatgcttttcctctggattctgagggtcaaaacagtcccaatggttcaggatacactcaaggggagtacaagctgggggtggtgaggagaactggctgcccattctgaaagacagggaatagaggtgttcctcatttcccttccttcttttggcaaaaagctcagggtgtgatggggagggaaagcaagcatcttcacttcactttccacctcttacccctgcgccctggcaaccttggcaggtgccggccacaggtacaaatgcggtatgtacccatgaagcagggagaacctggagattaggaattaactgccctcacctatgtttccttttctccctgctgttgaaaaactttgagttccctgggcctttttatcccatgaggcatggcctccttctgtgggatggggttcagtcagcaggaattggtcctgtccatttacattgtgcctgttgcctggctttgaattcctcagacctgctttctctttctagggcctcagcctgaagcttggaattgagtttgggactgaaaaagcatttcagaggctgtttatatccatttagtgcctcaaataagccctgctgaatttgcaattatcagccagcaggggtcactcctctgttaacttccctattagaaacagagcggtggggattctcacttagaaaagaaaaaaagagaaaaacagttaaagaggcaaaaagtggggaatgctgggggaagaaccccttgcttagtgcaagtgggcccctctaatccttataactttcccatccttcccccagttcagaccaggttgaattccttggccatggaaggaaaggttccattgatgcagtgggtgagaagcactctgtagggtcctggctaccatcggttttctcacacccccctcatcccaggcagtggagggagacacttctgcgacattgctccccctgccccttcatggctattgggtgtggcctttgcctgctgcaggcatgcctaggtgctggagctgggagggaaaagggtaaggagaggtgccctggaagccgctcatgcctggggctgtcaaggtggaggcatacatggcacctctaggaaaaattggtctgatttgcacctttggcggctgagccaaatgctcattttacttagtaacattgcctcagcctgtagcaaaactcttaacattataaaggaagagataagatccatttcaaataatgtgtgagagagaaaagagatgaaaggaaaacagagtcttttacctgcaggaaagggagagaagtggcagagttttggaagaaaggcaggcccaacagtttcccattcactcacactcaccttccgagatcccagacgagccaccagttgaaatgggaaaagtttccttgtccccctcacaggaggtggagtgggggtgtggcttgcttctttagtactccgctgctcaaacctctagggaagcatacagactggcaagttgtggggctacaaccccatggcagcatctaggggtagatgtttacagctgctgaagccccagtggacatgtggtaccatgtgctcttttagttttgccatctataggtggctttgtggtaaccagctcaattagacccattccttaacccaaagacagagggctttctgtatcccgcggttgttacctaggtgtaccagaaaaatcaaatcacacgtggtcttggagaatgagtgcaaggttttattgagtggaagtagctctcagcagatgggggagccaaaagggagaatagttttcccctgaagtcgggttattcagcggcccaggctctcctctggctgccccagccaaactctatgtcaatccattggtcggtggcctgccagagtgctggtgcctgttggtggattcctctcagcgtcgagagtttttccctctcaggaaagggagagaagtggcagccacccatgtgttcttgcactgatgtgctcctctcgacgtccaacctcctgtgtgtctgcctgctagggtcccagagtttttttaggcacaggatagggcatggtgggccagggtgatcttgggaaatgcaacatttggtcaggaaaacaaaaatgcctgtcctcatctaggtccaggggcacaagcccaggtttggagccctagccagggaccccggcctcctctacccatcactttccttcaccttttctgtatcattcaaagggaccatgcccttcccttcccagcacttctcttctgtatcaataggtgatgtttttaaaatttcccaactctagtgcaggcatggtactagacatatacatagaaataaaaccacacttattcttctggctggcaagacatagtatttttgccaaattatgtgttgttttgaagcattttatgtacccctggtcatataaaaataaagctattttgttcagtacaaacagcagcattttctggattagaaagttaatcatcttaaaagatcatcacggatttttccattgcactcatcactaattgctttggcaaaaaatttcttatctcacgcatgacaaaatcagccgcagtatctcctagtaatttaatggtgatgatctttataaaggaaataagcacatcaagggaaaacataattttttttaaaaaaagagtaataaaactttttaaaagtcttttttaaaagactgcttttctaaaatagtaaaataaaactccaccaataaaaccaccaacaaaacagaaaagaaaaaataatgatatgatcggagctatttgatgaaagatggtaaattaaatttaaaatgattagaagagaaaaagcaatacctgtctcccgtaggtctcagtccaggttctgctatgcctttctcctggtgagccacctatttaagagtcgcttaaagcatatgttaatccaacaacagcagattaaaaaccaatgcaatctgaactatttgatctaaaaacataaataaaatttaaaacaaataaaagagaaaaagcagtacctgtgtcctgtaggtctcagtccaagatctgctctgactcccttgtggtgagttagccctttagaagtcacttggggtggggcatatgttaattccactaacattggttctggccaatgagtcaggaaggtggtaaatggcaccttttcttcttgctgatttctttcagttcctttggagtctggacattagtcctttgtcagatgcctagtttgtgactactgtttcctatactgtgggttgtgtgtttaccctgctgatatttcttctgccttgcagaagattttcggtttcattaggtcctattgatcttattctatttttatatttttgcgtttgcttttggggcattagtcatgactacttggcctaagccaatgtctagaaaagctttttggatgctatcttgtagcatttttagactttcaggtcttagatggaagtttttatatgctttgttaaagatcaggtgactgaaagtaccgggctttgtttctcggttctctattctgttccattgctctatgtgcctatttttatacttcctgcaccatttattgaataaagtgtcctttccccaattagtgtttttgcatactttgttgaagattagttgtctgtaagcatttggctttatttctgggttctctattctgttccattgctctatgtgcctatttttatacttcctgcaccatttattgaataaagtatcctttccccaattaatgtttttgtgtactttgttgaagattagttgtctgtaagcatttggctttatttctgggttctctattctgttctattgctctatgtgcatattttataccagtatcatgctattttggtgattgtagccttgtagtataatttaaagcctgccttcagatttgttctttttgcaaagtattgctttggatatgcggtcacgtttttggttttgtataaattttaggattcttttttctagttctgggaaggagaatgatgatattttgatgagaattctactgctctgtagatggctttggagagtatggtcactttcacaatattgattctacctattcataagcttataatgtgttcccatttgtttgtgtcaactgtgatttctttcagcactattttgtagttttccttgtaggaaacttacattaacctacttggttaagtatatttctaagtattttacttattaaaaattctcagggaaatgcaaagtaaaactgaggtgggaaattaaagaaaaataaaattaaaaagaaagggaaataagctttcttgtattaagctaacttgtcccagaggcagcaacaggcacagcccagacccaggaaaagtcttgataatattatttattgtattctggagactcttccagcactccttcaatgtagggagaagaaaaacaaattttcctttgttttatggtatgagtttatagattcttgttctctttaactagtaacttcaagtattctgttttatctaagaagtatggcaaaggtcatgagaagcctgagcaggcctgaactacagctctctaggcaccatagtgaagataaaccaatgcaagcctctttagagcaaaacctagataatagacatctgggttgcatagcaacagttatgtgcaatcctgagttatgaacctgttacaatttgattaactgtctttttcctgcctctgtatccctgctttcacaccactgtaagcttgcttcaagctggcccacccccttttgtgaagtgtgtataaaagtcaagtgctgtctttgttccaggccctgtctttggacgtgagtctgctgggcctgagagcactcaataaaagattctcctgttttaacccaaagcctctctctcatcctcctaaatcccacaacaaaaccacaatgagatgctatcttaatcttgctagaagcccataatttaaaagtcagaaaacaatagatgttggcatagatgtggtcaaaagggagcactttgacactgctagtgggaatttaaactagtccgaccactatggtaaacagtatggggattccttaaagaactaaaagtagaccattcattccagcaatcccattactggctatctacccaaaggaaaagaagttattccataaaaaagacacaagaatatggatgtttatagcagccgattcgcaattgcagtgatatgggaccaacttaagtgcccatcaacgaacgagtggataaagcaaatgtggtacaccatggaataatacttgataataaaaaggaacaaaataatgtcctttgcaacaagttggatggaactggaagccattattctaagtgaagtaactgaggaatggcaaatcaaatattgaatgttttcacttttaaatgagagttaagctatgagaatgcaaaggcataagaatgatataatggacttggggactcagggggaaaggttgggagggggatgaggaataaatgatgacatattgggtatattatacactgctcaggagacagatgcctcaaaatctcagaaattaccactaaggaacttttatccacataaccaaaaaccacatatattccacacactattgaaagaaacataaacattattttaaaaaataaagccacttttaaaattagcaaaataaaataaatatgtcttcagagtttagatattggatccaaattagacagatcaaatactgcctttactaaatattttcatgtcattaacaacttctaaaacctttcaaacagttttttgacatgtcttggaaccatccatttctagctaaggcctgggcacctgtgaaatagggccatgcccccccttatactgggaagagtaagatatttcaagactaagatgttttctacagctccatctttttctttaagctctacatcaaggacataattaaaattggttgtctcctaagtggtttactaaaaatgcatacttaagagttaccattataattaatatttgtatctaaagctacttaaaaattttcacacacaaatctgactgaacaagtaaaatatattttaagtcaaagtttataaaaggacatgagaacatagcttttatgaaaaaattagttttgtcaagtttagaggttttcaaatattttaaattcaggaaataaaataacaaaaagacaaaagaaaatggttgaacaacttagaaaaggtttgttaaaattcatcttataaaacaatctacatgtaaaaagtgggctaaaatttgaaagagattatttaggttttccataaattaatccagaaggggtaggaagtcttaagaatgaggaaggacaggaggaaggggaggtcatcctgacactgcagaggcagaagtgcagctgaaggtatgaaggctaagaggggaggggagtttgagtgctgctgcctggctgtcagagcagaggagggtcctgggcaccagacttgaggaagggatgaaaatgctgggcagacctgtagtgggcccttgagatggcagatagtggtttccagagagagggccattgttttccagtgcccagcactgagcagagagagttttgggcagtgtaaaaaaaaaaagagaacttacctctttctcgttttagaaaaagaacagtctaagaatatcagcagggaaactctcagtgcttcaaggggttaaacgcccttttggctttcttgtgttggtttcatcatagaggaggagaaacttcttggaagtgttcctaaaaacacaacacgtctgcttctcctttcaaaaaaggaagtgctaaaacacgaacactctagatccaaatattaatacggatgtctaaatgcttccgttttccaaggggcagaaagctaaaggttgtaacctattcatttcagtcaaagttggtgaaagggaagcaaaggaactgggtggggcttggaaggatgacgaagctcaagctcattggccagcaacctctctcctgggggcgggaggggtgagcatacgtcattgctttggcttctataaaatgaggaggactcaccgagtgtgaagagtccttctggtgattgcagctgagagcacactcacgacgttctgcaaggattctctgattatgattctgaagggaaaagcgatggaatggacagcagagattgtaattttctttatcttgaattacggaagaaagtatctaggacagaaatccacgacaagtccttggaaccagcagatctcttcgttcacggagacgttgacgtattctctattgaagaagattcttaccttcttactggacaaggttttgtcagttctgcgtgactggattgtccgggagactctgaggaaactgatgtcacatgtttttccaaagaagatgtttctggaaccaacaactgtgattgtggtttgaggacttctgagagttccagtacaggaaataagcagaacatcagctggaggctaaacggatccagacttcactcttcacttcccttcctattcagtctattgtgcctgctgactgagaagcttggctggtatgtgagcaaataaacggaactattcagaaggagatgttgacatattctgtattgaagaagatccttatcttctcacctgacaaggttttgtcagttctgtgtgactggattgtccggaagactctgaggaaactgatgtcacatgtttttccaaagaagatgtttctggaaccaacaactgtgattgtggtttgaggacgcctgggagttccggtatgcgaaataagcagaacatcagctggcggctgaagggatgcagcctccactcttcacttcccttgccattccatctattgtgtctgcctgactgagaagcttggctggtatgtgaggaaataaacggaattataaacaaggagattgtttctcatctacttcattctgttgtggcttttctattttggggttcagggtgtgtgacaaggaccaaggagatgaaaggtttcatgatggagaaagcccaggcaatcagattgaagagctatccacagggaatcttggctgctgaggggctgcaccctgcaacggactgaccatatgacagaaaagggttttaaaggctcaacttctggactgagaacccagagtaatttgggaacctcctctgtgaggagatatgaaagctgggaatcatgacatccctaggaatggaaggcacatttcctgatggaaggggtgctttggaaaacaggagcagagtagacacagcagccttgtggatacgggtgggcagcatgcatgggtgatgtgaacgtggagtgtttgtgatcgaaactcaaaatgtctgacaaagtgaaaacctagaaaccacaatgaggaggaagagtttgtgagggcaatcactctccccatgtgtgaaaatcgggggctcttaaaatctcatctggagaggtgcagtctaccaaactctgggactttagcctccccttttaaaaaaccgtgcatcaataccaacgtccgaaaccacagaaataacacctggcttgcatggagacaaggacaaaaagccgtcatgatgagttgttctgctcacttgctgcctctgttcagtgcacaggatattgtccacccactagcaggctactgcaagagaagtgtgcaatatgttccctatgtgccatatatgtgccatatggcccatatgacaactgagtcagaaaatatctgatgccctcagagttacactccacctggagcttgcccccagccatccaggacctaggctccctaccctgtccaattttctggtgttttgggggcttcattctctaaggtgtgcccactctttactcaaaccaaaacacccacatattcctgcccatgaacaaccaatcaaccacttctcagttccacatcctgctgttgggtctctagtggtgacactgtaactcccaggtcatagtggtgacactataacacctagctaaattgatgccttgtctctaggaggccatgggctcctgcaggtctcatctgactctctgtagccttccctgacaatgctcacaatacccaagccagagccacattgacagcaagctgctctcatcttacctttgccagacctggccactggaaaaggctgaccctcatcctgcaatgcctatacctccaacctttgtctcaagctggtgtcctggagggacttctaagcagaaaacagattcagactcccatcctctcctgaatggcctcatatccaattctcagaccctcagccttcattgtaaggacacttcatccatgcccttgagtattctgtctgcactgtgtattctgcaatagattctcctccctctgcgaccctcaactccttccgcagactttttgttttcttgatcatctaccatagtcttccactgggacactgccaagcccattctggagagtgagttgtgcaagtacactgccccccatctacctttcgggaggtgtatacacccttctttctcccaggtctggaggctttctattttcatcctgaggcatctccacctgctcttggattcttcaaattgacaaccaccagttaacaagaactatgtgtcaccaaatagccaaacaatggcaattacaaaaataaaattaatagctgtaacccccattagcaaggatacacaaatcaaatcagggatagtgggtgaggaagtctgcctaacattcaaggaaggattctgaagtgatacaaaatcattgcctttgctatctttagaatggacactttcagccaggcacagttgctcagcctgtaatcccagcactctgagagccccagttgggtggatcacttgaggccagcagcttgagaccaccctgggcaatgtgcagaaaccccaactctactaaaaatacaaaaatagccagttattgtggcacatgcctgtaatcccaactccttgggaggctgaggcacaagaatcacttgaatctgggagccagagtttgtaatgagcgaagatcatgccactgcactctagcctaggcattagagtgataatctgtctgtggaaaataaaaacattcctcttcaaagttttcttctttaaatcataaatgttggaattaatatatcctctttgaaactcactttcttcaagcttctttatttgatggtagtaaatctttgttaagctttatgaggcaagagtaatggaagaagcatattatatatatttatactctaacctcagtgcttgttctagcaagctcaggcatgcgtgaatgtgcccaggcatgttccagcccataccttatatcctttccttattgggaaatgctgttactcctataagcattcttgtaagcaacttcctctttttctttgtctccactatctttacctattgaggacagttttaggttcttagccagttggatgtagcatagactgtgaggtccaaccccagccaatggagatagcacacagcagtagcgacctcatgcttaacagataaatattcctgtctccctttgtttggggtgctctcagctgatgagcaacaccctttctaaagaaattaaagttgtcttgctgagaaaacttttggtctaaatgctgattcttccttgcagcactgaagaagaagcaattatttccaacactttctcatacacaaaaaaagaagaaggtggaagaaaactttcttgtgcaccctatccctcactcagaaagacaacagaaggctcctagtggcaagccctagaggattcatttcttttgggaaccctcttggctgggatactaggactcaggtcaaactcagcattttcagtgtgtgggaagtgtgcttgggtttcactgttacttccaataatgtgatttggtccttggggttcaccaaattttggtatggagtggtgaaccctgttaagtttaagtgtctataaaattaacaaagcaaaataaccattctgccccatggttcagagaccaaatattgtgtaggaaatgctttagcgagagaaacagagaagaataaaaaatgtcctcaagcgctgcattatttcttgttatcgtccagatcttagaggaaaggctttcattttccctcattcagtatgatattagctgtgcatctgtcatttatggcttttattatgttggggtatgttccctgtgtatgtagttttttcagggtttttgttatgaagtgatgttgaactttatcaaacgtttttcagtttcagttgaaacgatcatatgctttttgtccttcattctcttgatatgatgcatcatgttgatgatttccatatggtgcactgtccttgcatcctgggcatgaattccacttgatcatgacaaatgaatttttaatgcattcttgaattccgtttgctggtattttgttgaggatttttgcatcaatattcatcagagatattggcctgcagtttctttttttttcttttttctttgttttgttgtttgtttgtttgtttgttttgatgtgtctatgtctggttttggtatctgggtagtagtgttccatccccttttattttttagaataatttgaataagactggtgttggttctttaaatatttggtagaattccgaagtgaagtcattgggccccgggcttttctttagtggaaggctgtttattatggcttcaatctcgttacttattattggtctattcatgttttgaatttgttccttatttaatcttggtaggctgtgtgtatctaggaatttgtccatttcttttagattttcaaatttattggcacataattgcccattgtagcctctaatcgtcatttgagttcctgcagtaccaattataatgtctccttcttcatttttgattgtatttatttggatcctgcccctttttttcttacttaggctgcctaataatttcttaattttgttgaactttttcttttgtttgtctcgctctgccaccaggctggagtgtagtggtgtgatcttggctcactggaacctccgtctcccaggttcaagcaattctcctgcctcaccctcccaaatagctgggactacaggcaagtgccaccactcccagctaatttttgtatttttagtagacacgggttttcaccatgttggccaggatggtctcgatctcttgacttcataatccacctgcctcagcctcccaaagtgctgggattacaggcatgagccactgcgcccagcctaattttgtttaaattttcaagaaatcaacttcttctttcattgatttctgtattttttatttccattttatttatttaaactctaagctttattctatcttcttctcattttagctttggtatgcttattgcctctctagctctttaatgtgcattgttagattgtttatttgaagttcttcctctctacaccataagacgtaagcatgtcctcattatgtcataagatgtaaccacttacagctataaacttccttcttagttctgcttttgctgtatctcataggctttgttatgttgtgtttccattatcaattgtgtcagaaatttttcaatatttttcttaatttcttcattgagcaactgatcatttgggagcatatttttaaacttccatgtacttacatagtttccaaaatacctcttgtgatcaatttctagttttattccactatggttcaagaagatgcttgatattatttcaattttttttcacattttaagatgtgttttgtgacctaacatatggtctactttttttttttattaaactttaagttgtggggtacatgtgtagaccgtgcagttttgttacataggtatacacgtgccatggtggtttgctgctcccattaacctgtcatctacattaggtacttctcataatgctatccctcccctaacctccaccctctgacaggacctggtgtgtgatgttcccctccctgtgtccatgtgatctatttttgagaatgatccatgtggattagaatgctgtggaaaagactttggattcctaatatccagggagggagacgatgatattactttcaatatcacacgggtgtacacactctctgtgacattgttcctaatatccagtggaagagaggatgatataacacccagggagggagaggatgatattactcttaatattgcagggtgtgtacccatgcctatgatattgttcctaatatcaggagggggagaggatgatattactcagaatatggcagggggtgtacacacactctgtgacatggttcttaatatacaggggagaatgggacaatattactctcaatatcgcagggggcgtacaaccctgtgatttgttcctaatatacaaaaggggacagtatgatattgttcctaaaatcgcagaaggtgtacaacgccctgtgatattgttcctaatatccagggcgggagaggatgatattacccccaatatcacagggggtgtgcactttccctgttacattgttcctatgatccgagtggggggaaatgacattagtcccaatatcgcaggatgtgtacactactcccccatgatattgttcctaatatcaagggggagagaggaggatattactcccaatatcgcaagggaggtacatcctccatgcaatattgttcgtaatattcaggaggagagaggaagatattactctcaatatcgcagaaagtggacacccaccctgtgatgttcttcataatatccagggaagcagacgattatatgactttcaatatcgctgggagtgtacatcccttttgggatattgtttctaatatccaggaagggagaggattatattacttccagtattgcagccagtgtacacatttcttgtgatattgttcctaatatccagaaagggaaaggatgatattactcccaatattgcaggtggtgtacacccccctctgatattgttccttacatcaaggaaaagaaagaagaatattactcccaatatcgaagagagtgtacacccctcctgtgatattgtatttaatatccatggggaaagaggatgttgttactcccaatatcgcagggggtttacacccacactgtgatattgttcctaaaatccagtgaaggagaaaataatattgctcccaatattgcagggtgtatacaggccctcccccgttatattgctcctaatatccagcggtggagaggatattactttcaatttttgcagggagtgtgtaccccctctctgatatttttctaatatcaaggatgggaaaggatgccattactcccaatatcgcaggaggtgtacatgccctgtgatattgttcctaatatccagggaggtagaggatgatattactttcaatattgcaggggctgtacaccctctatgatgttgttattaatatttaggttgggagaaaatgatatttttcctaatatcctgggaaggaaaggatgatattactgtaaatattccagggagtgtacaccttcctaatattctaatattgttcctaatatccaggggtgggagaggattatattactcccaatatcgcagtgggtgtacacccctcctgtgatgttgtttctaatatccaagcgaggagaaaatgatatcactctcaataccgcagggggtgtacaccttccccatcatatcgttcctaatattcagagggaaagaagatgatgttactttcaatatcgcaggggttgtacacaacccctgtgatatttctcctaatatccaggaagaaagaggatgatattgctcccattatagcagacggtatacgcctccctgtaacattgtttctaatatcaagactgggagaggatgatatcacttccagtatcgcaaggggtgtacacctcccccgtgatattgttactaatatccagggggaagaggataatattactttcaatattgcaggggctgtacacccccgtgatattgttgttaatatttaggttgggagaaaatgatattagtccaaatatcgcagagagtgtacacacttccgataatattgttcttaatatccatgggggagacgatgatattacacccaatatcgcagggggtgtagtctccccttgtgatattgtccctaatattcagggaagtaaacgatgatgttagtgtgaatattccagggagtgtacaccccctttgtgatattgtcctaatatccgcaggagagaagataatattactcccaatatcgcagggggtgaacacaccccctgtgatattgtttctaatatccaagcgaggagaaaataatattactcccaatgtctcaggggatatacaccttccctatgatattgtttctaatattcaggtggaaaacgggtgatattactcctaatatccaggaagaaaggggattatgttactccccttatagcagggggtatacacctcccctgtaatattgttcctaatatcaaggctgggatatacgtggggggaaggatgatattactcccaatatcacaggggttataaaaccttctgtgatattgctcctaataaccatggcggaagaagatgatattactcctaatattgcaggaggtgtacactcccccattatgttgttcctagtatgcagaaaaggagaggatgacattattgccaatatcgcagggtgtgtacaccacccatgatattgttcctaatatttagagggacagaggatgatattactcccaatatcgcagggggtgtacacgcatcccctgtgatattgttcttgaaatcgaggggaaagagaattatatttctctaaatattgcagagggtgtacaccgccccctgtgatattgttcctaatagccgggggcggggggagataattaaattactttcaatatctcagagagtgtacatcccccttgtgacattgttcctaatatccagagcaaaagagaatgatattcctcccagtatcgcaggaagtgtacatttaacctgtaatattgtttctaatatccagggggaagagaatagtaatactcccaatatcgtaggggttgtacaccttttctgtgatattgttgcaaatatttagaagagagagagaatattactcgcaatatcacagggaatgtatacttcccctgtgatattgttctaatatctagaaaaagagaggataatattactcctaatattgcagggggtgtacacccccacttgtgatattgttcctaatataaaggaaggtcgaaaaacaaacggggagcccagggggaaggaaggcaggcgaggaagaggcagcgccggggcgccggagggagcagccgggccgcggaagcgcgagcacgagaccggtcgcggtcgcagtcgcatttttgccgttgtcgcggccgccgccgccgaggcttacccggggatgtctgagcccgcgcctcgcggcccccaagctccacgctgcgcccgctgtcccggcctctaagggccgccacgtccctgcggcgcgcgcaggcagaaagcggcttcgtgccggcggagggggcccgggcgggccgggaaaggctgccccaggccccgcgcctaccccatcaccgcggccggcgccgggccgggaggatgagcggtgtggggctctgaagcatggagggggttttgtacaagtggaccaactatctcacaggttggcagcctcgttggtttgttttagataatggaatcttatcctattatgattcacaagatgatgtttgcaaagggagcaaaggaagcataaagatggcagtttgtgaaattaaaggtgacagctttggaggggaccacccttgattggatacataaattctgttcattcagcagacaacacaagaatggaattaatcattcctggagagcagcatttctacatgaaggcagtgaacgcagctgaaagacagaggtggctggtcgctctggggagctccaaagcatgtttgactgatacaaggactaaaaacgaaaaagaaagaagtgaaaccagtgaatcgctgaaaaccaaaatgtctgaacttcgcctctactgtgacctcttaatgcagcaagttcatacgatacaggaatttgttcaccacgatgagaatcattcatctcctagtgcagagaacatcaatgaagcctcttctctgcttagtgccacgtgtaacacgttcatcacaacgcttgaggaatgtgtgaagatagccaatgccaggtttaaacctgagatgtttcaacggcaccatccggatcccttagtttctcctgtgtcaccttctcctgttcaaatgaggaagcgttctgtcagccaccctggttcttgcaccagggaggagtagccactgtataaaagaaccagtatctgcacttcaccgactctcccagcgacgccgaagaacctactcagatacagattcttgtagtgatattcctcttgaagacccagatagacctgttcactgttcaaaaaatacacttaatggagatttggcatcagcaaccattcctgaagaaagcagacttatggccaaaaaacaatctgaatcagaagatactcttccatccttctcttcctgaagaaactgtagtgtccaactttctctaagtattgctatgcaaaagctgctgtaattgaactattgttatagggagtagttttttcccttaggactctgcactttatagaatattgtaaaacagacaaacaagaaaacaaaccacatacttttgaagcgtgttttatctttatatagtttgtttgcaagagtattttcctaataacttcacagtatgaatgtgcatcttttttttctttttttaacaaatgatggtgtaacattttgacatccataaggacaaatgtagatatttttctaaaaaaccgtgaggggactgacagcttggtcagggtgtattgtagcttataaacatgaaatcttacaaggtttcagtttgacagaagtgtgatatatgtaacttgtgccatggaccaaatggtcactttaccacagctaaaaatgagttatgatagcagcttgatggtgattgcattgtattcctttaatcaaaaaggaaacgcaatattctaagtatctttagcccaaataccatgacatattgagcatctttaaataaccagactgtattgtccttcatatgtgaagttgacactactgatttgtcaataccaaattttgggttaaagtgtttaatttttatttatttattttcttgttgcctcaaaagatgattgcattctaacttttgtgacctaccaaatttaagatgtgtatacattgttctttacgttgttctagaaaagagattttaatgctgtagtgacttagctcacttacatcagagaaataaacaactttcaatggaaaaaaatatatataaaggaaggaagaggatgatattacttctcatatagaaggggttgtacaccccccttgtgatattgttcctaatattcagggagggagaggattatattactcccaatatagcagggagtgtacacccccccccccgtgataatgttcctaatattcagggaagcagaggatgatattactttcaatatcacagggggtgtgctgtccccctgttatattgttcttaatattcaggggggagaggatattattatgcccgatatcacaggagaagtacaccccacaagtgatattgttcctaatatccaggggtaaagaggatgatatcgcaggtggtgtacacccctccccgtgatattgtttctaatataaagaaggagagagcatgatattactcccaatatcgctggaggtctacaccccccttgtgatactgttcctaatatccaggaagggaaacaatgatattgctgtgaatattccagggggtgtacacccctttgtaatattgttcctcatatccagggggtagagaggatgatattactcccaatatcgcagggggtgcacggccccactgtgatattgtttttcatatccaggaggggagaggatgacattactctcaatatggcagggggcgaacaccccctgtgatattgtgctagttaggttgggagaaaatgatattactcccaatatcgcagggggtgtacaccgctcctgtgatattgttcctaatatccatgacgggagaggatattactcccaatatcgcagggggtgtacctctcccctgtgggattgttcacagtatccaaaagggaagaggatgatgttactcccaatatcacagggagtgtacaccaccattgtgatattgttcctaatagccagggaagaaaacgatgatattattgtgaatattacagggggtgtacacaccccctgtgatatggtttttaatatacaggttggaaaaggatgatattactcccaatatcacaaaaggtgtacacacccccccatgatattgttcttaatacttcggtggggagaaaatgatattagtctccatatcacaggggtgtgaactcctccggtgatattgtttttaatatcaagaggggaggagatgatattgctttcaatatcgctgggggtgtacatccctcctgtgatattgttccttatatccaggcgaggggaaaataatattactcccaatagtacacaccccatgtggtattgttcctaatactcagggggaaagaagataatattactttcaatatcacagggtttgtacacctttcctgtggtatagttttcaatatccagggggaaggtacatgatattactcccattgcagcaaggggtgtacacacctcctgtgatattgttcctaatatccagaagtggtgaggatgatattactcccagggggtgtacaccccacctatgatattgtttctaatatccaggggaaaagagtgtgatattatgcccaatatcgcagagggtgtacacttatcctgggatattgtttctagtatttggggagggaggagaggatgctattattctcaatatcgcagaaattgtacacccccgctgtgatattcttcataataatcagggaaaaagaggatgatattactaccaatattgcagggggttacacttcccctttggtagtgttcctaatatccaggaagaaagaggatgatattaatcccattttccaggaagtgtacacccaccgtgtcatgttgttcctaatatccagcagggaagaggatgatattactcccaatatcggagagggtgtacacttcccctgttatattgtttctaatacccagggggaagaaggatgacattactgccaatatcacagggtgtgtaccccaccctgctattgttcctaatattcaaaaggaaagatgaaaatattactcccaatatctcagggtgtgtacacctctcctgtgatatcgttcctaatatccacaggaagagagaatattactctcaatattgcaggggggtgtacacccccctgtgatattgttccaaatattcgggcggggagaggatgatattagtcccaatatcgcagggggtgtgcaccaacctgtgatattgttcctaatatccatgcgggggaggacgatatcactctcaatgtcgcaggaagtgtacacctctcttgttatatttttcttaatatccaggagggaaaagatgatattactgccaatatcgcagggtgtgtccaccccccttttatattgttcctaatatccaatggaaaagaggatgacattgctctccatatcccagaaggtgtacaacgcccctgtaatattgttcctaatattttgggggaagagaggatgatataacttataatatcacaggaggtgtacaccacccctatgtattgttcctaatatcctttaagggagaggatgatattactcccaatatctcaggtggtgcctattccccctgtgatattgtttttaatatccaggggaagagagtatgatattacgcccaatatcgcagggggcatacaccctctctgagatattgttcataatatatagagggagagaggatgatattacttccaatatcagaggtggggtacaccccccggttatattattcttgatatccaggaggggagaggttgatattactggatatatagcagggagtgttcacatcttctgtgatactgttcctaatatccagaaaagtagaggatgatattactcccaatatcgcagaacgtgtacacctccctgtgatattgatcctaacattcaaaggggagaggatgatattactcaaaacatcacagggcatgtacactcccctgtgatattgttcctagtatccagaagggagcaagataatattactttcaatatcgcagggggtgtacacccctctttggtatgtttcctaatatccagaaggaaagagggtgctattactttccatattgcaaggggtgtacacccccctgtggtatggttcataatatccagggagggaaagggtgctattattccccatatcgcgaggcatgtacaccctgctgcggtacggttcctaatatccagggggaaagaggatgctattacttcccatatcgcggggtgtgtacacccccgtgtggtatgttttgtaatctccgggaacgaagagggtgttattacccctcatatcgctggaaatgtacactcccctgtggtacggttcacaatatccaggggattgagggtgctattactccccatatcgcggggggagtgcacctccctgtggtatggttcgaaatatccagggtaagagagggtgctattattccccattttgcaggaggcgtacacccctctatggtatgttttgtaatatcccaggtaaggggtgctattgagagaagagagcaaaagaccccccccatattgttctgtattattttatactcagtacctgttttaagaagaaacaaggaagcgaaaccaaaggcaggcagcccggcgccaggcaccagatccaaaaccagacccgaaaccaggcctgggccttcctgaccttagcctgaaagttaaaattcaacccatgacctagcaactgatgttatccatagattccagacattgtatggaaggacattgtgaaatttcttgttctgttctgtttcactctgagtactggtgcatgcagcccttgtcacatacccactagattgctcaatcaatcatggccctttcatgtaaaaaccttagtgttgtgagcccttaaaaaggacagaaattgtgcactcaacaagcttggattttgatactctagtctgctgatgcttccagctgattaaaagccacttccttcactacctcggtgtctgtgggattttgtccgcggctcctcctgctacactgtgactccccttatagagaggggtgtacacccccctttggttcctaatatccagcgggggagtaggtgctattactccccatattgcggggagtgtacacccccttgtagtacggatcgtaaaatcaaggagggagagaaggtgtaattatccccatatcacagggagtgtacacccctttgtggtatagtttgtaatatccacgacgggagagaatgctattactccccatatcgtggagggtgtacaccgccctgtagtatggttcgtaatatccggaaggggagaggttgctattactccccatatggtgggaagtgtacacccccatgtgatatggttcataatatccaggggggtagaggatgatattacccacaatatcatagaaggtgcacacccttttgtgatattgtccataaaatccagaaggggagaggatgatattacttccaatatcacagggggtgtgtagccccatatgatattgtttgtaatatcaaggtagggagaggatgctattccttacaatagctcaaggggtgtaaccttcttgtgatattgtttgtaatatccagaaggggagaagataatttttttattttaaaagtaaactttaatgtcaaaaatgcaaacttgagaagggcagaaagatcaaacagaaggctgccacttcacaattggagggttgcacagtggccgggcagaggcgctcctcactccccagacggtgaggcagccgggcagaggtgctcctcacttccgagatgttgcaggagccgggcagaggtgctcctcacttcccagaacagggggctgccgggcagaggtgctcctcactgcccagacggtttgcaggcctggcagaggcactcctcacttcccaaacggagcagcggcaagccagaggcgctccacacttcccagatggtggggcagccgggcagaggcgatcctcacttctcagagggtagggcggcccagcagaggcgctcctcacttcccacatggtggggcggcaggctagaggcgatcctcacttcccagacggtggtgtggccatgcagaggtgctcctcacttcccagatggtgtggccgccgagctgaggcactcctcacttccctgacagtggggcggctgggcagaggcgctcctcacttcccagacacttggactccgggcagagactctcctcatttcccagatggtggggctgccgggcagaggcgctcctcacttcccagacggttcagaggccgggcagaggcgctctggggagaggataatgttactcccaatatcgcagggggtgcacactccctgtgatattgttccgaatatccagagggggaaaggatgatatagctcccaaaatcgtggggagtgtacacccccctgtgatcttgtttgtaataccaagaagaaaagagaatgctattatttccaatatagcagggggagtacaaccccctgtgatattgttcgtaatatctagggggagagaaaattatattagtcttaatatctcaggggacgttcatccccctgtaatattgttggtaatattcagaatggagaagatgatattgttcttaaaatacaggaaaaaatatgataatattacttccaatatcgaagggggtgtacactctcctgtgatattgttcccaatatccagaatgaaagaggatgctattactcccaatatcccagggagtgtacacccctttgccatattgttcataatatccaggggaagacaggataacattactcccaatatcaccgggggtgtccacccactagtgatatttattgttcatcatatccagaaaaggagaggatgatattactcccaatattgcaggtggtgtacggtccctgtgatattctttgaaatatctagaaaaggagaggatgatatcactccgagtatcacagggggtgtacacccccctgtgatattgttcgtaatatccaggggagaaaaggatgatataattgccaatatttcaggggatgtgcacctccctgtgatattgtttgtaatatccaggggtggagaggatgatattactcaaaataacgtaaacatcctgtgtgtacatcccctgtgatattgtttataatatccaggggggtagaagatgacattacccccaatatcacagagtgtacacacccctgggatactgttcataatatccaggcgggaaagaatgaactacttccaatatcgcaggatatgtacacccccctgtgatatatttcctaatatttatgtgggtaaggatattacccccaatatcacagaaggtgtacatcctctttgtgatattattcctaacatccaggaaaggagagaatgatattactcccagtatcgcagggggtgtacaccacccctgtgatattgttgctaatatccagggggagaggataatattactcccaaaatcacaggggacgtacactcctcctgagatattgttcctaatattcatggggaaaagaatgctactactccaaatacagcagagggtgtacaccatccccgtgatattgttttttatatccaaagggtgaaaggctgatattactcccaatatcgcagggggtgtacaggccccccatgatatcattcttaatatccagggaggcaaagaatgatgttactcccaatattgcaggctgtatacaccccccgtgatattgttcctaatatccagagtaagagaggatgacattgctcccaatattgcaggggttgcacgcacgccctgtgataatattactcccaatatcaacagtgggtgtacactcctcctgtgatattgtttgttatatctaagaaagaagaggatgatattactgtcaatatcacagaaggtgtacagccccttgtgatgttgtttctaatatccagcggtgagaggatggtattactcgcaatattgtagggggtgtccaacggccctgtgatattgtttctcatattcaaaaaggaaaagaataatataactccaaatatcgcagggtgtgtacacttccctgtgatattgatcctaatatccaggaagagagaggatgatattaatcccaatatcacagggggtgtacatcgcttctgtgatattcttcctaatatccagggggggaggggatgctattactcttaaaatcgcagggaacttacactcccactatgatatttttcctaatatccaggaagggagaaaatgatattactcctaatatcacatatcacaatgggtgtacatctccccgtgatattgtttctaatatcaaggatgggagaaaattatattactctcaatatcgcagggggtgtgcacacctcctgtgatattgttcctagtatccagcggaggagatgatattactttaaatattgtagaaggtgtacaacccccctttgatattgttcctaatatccagggggaaaggagatgatattactcctaatatcgcaggggctgtacaaccctatgtgatattgtttcttctaatatccaggggtggagaagataatattactcctaaaatcgaaggggacatacactccccctgtgatatttttcctaatatccagaaggaaagaggatgatattactcctaatattacaagaaatgtatacctgtcctgtgatattgttcctaatatccagaggggtaaatgattatattactcccaatatcgcaggggtgtacaccttccctgagatattgtttctaatatgcagtggaggagaggatggtattactcccaacatcacaggagatgtaaactccccttgtgatattcttcctaatgttcaggacgaaggagggtaatattactcactgtattgcagcagggggtgtagagccccctgtgatattgtttttaatattcaaggttggagaaaataatattccttccaatatcgcatggggtgtacacccttctttttatatagtttctaatatctggggggagaggatgatattactcccaatatcgcagggggattacacccccactgtgatattgtttttaatatccagggtgggagaggataatattactccaaatatcccagggctatacaccctccgtgtgatattgtttctaatatccagaggaagagaagatgatattactcccaatgtcacagggtgtgtacaggccttctttgatattgttcttaatatccatgagggagaggatgatattactcccaatatcgcaaagactgtacaccctttctgtgatattgcttccaatatccagggagggagaggatattacactcaggatcacagggggtgtacaccccaacctgtgatattgtttctaatatctagggaaaatgagggtgatattactatcaatatcacaggaggtgtacactcccttatgatattgttcctaatatccaggagaatgacaggataatattactcccaatatcgcgggtggtgtctccccccactccgtgatattgttcctaatacccagagggggagagaatcatattactcccaatatcgcaggggatgtacacctacatccggcggagtagaagataatattactcacaatatcgcaagaagtgttcaccttccctgttatattgttgctaatatccagggagtgagaagatgatattactttcaatactgagcgtgtacactacccctgtgatattgtttctcatatccagtagaggagaaaatcatgttactcccaatattgcaggggtgaacacctcctttgtgatatttttcctaatatcaggaaagggagagtatgatattacccttaatattgacaggggtgtacacccccctttgatattgttccaatatccaggggggcagaggataatattattcccaatatcgcagagggtgtacaccccccgtgatattgttcctaatatccagagaaataaaaaatagtattatttccaatatcacagggcgtacattttccctgtaattttgttcctaatatctggggggtggggtggcaggataatattactctcaatattggagagggtgtacacccccctgtgatattgttcctaatattcagggtgggagagaatgatgttactcccaatatctcaggagtcgtatacacccccttgtgatattttttctaatatccaggaggcagaggatgatattgctcccaatatcgcagggggtatacacccgagctgtgatattgtttctaatatgcaatatgggggaaggatgattttactttcaatatcgcagggaatgtacactttccttgtgattttgttcctaatatccaggggtggagaagatgctattactatattactcctcatatcgcaggcggtgtacaactccctgtgatatggttcagaatatccagagtgaaaaaggagggtgacattactcccaatatcgggggggtgtacacccctttgtgatgtggttggtaatatccaggggggcagatgagggtgatatcactccccatatcgtggaaggcgtccacttttttgtgatgtggttctttatatcccgaggggagaaggtgatattactccccatatcgcgaagggcatacacccccctgtgatatagctcataatattccggagagtggaggaagatactatgccctatatcgcgggtggcctacaaccccctatggtttggcttataatatccaggggggagagggtaatattgctccccatattgtggagacgtacagccccctgtgatatggtttgtaatatctttggggggcgagggtgatattactccccatatcgcggggagcatacacccccgtgatctggttcatagtatctcaaaggaagaagttgatgtgtacaacttaagggaaaaagttgaagtgaagtgtacacacgccctgtgacgtggttcataatatccaggcgggggagaggagagtgatatttactccccatatcgcgggtgttgtaaactcccctgtgatatagttcataatatccaggggagagaggagggtgatattgctcctcatatcgcgaagggtgtacaaccccctgtgatatggttcataatatccagaagggtagaggacgatgatattactccacatatcttgggaggtgtgatatggttcgtaatatccagcgatgagagaatgatattactccccatatcgcaaaaggtgtgatagggtttgtaatatcctgagggggagagggtgatattaatccctatattgcagaaggactacaccctcccatgacatggtttgtaatatcccagggggtagagtgtgatattactttccatatcacagggggtgtgatatgattcgtaatattcgaagggggagagggtgacactactctccatatcacggggtgtgtgatatggttcttaatatcccaggggttagaggttgatattaccccctttttggggggtgtgtacaccccctgtgatatggttcgtaatatcccgggggagacagggtgacattattccccatatcgaggggatcgtacaccccctgtggtgtggttcataatatccctagggggagatggtgatattactccccatatcagggggcgtgcactcttctgtggtataattagtaatatccagggggcagaggtcgatattcgtttccatatcatgaagggagtacacttccctgtgatatggttcctaatatccaggggggagagggtgatattattccccatattgcggggggacatacaacccctgtgatatggttcataataaccagaaaagaagagggtgatattaatccccgtattgcagagggcatacaccccccctgtgatatggtttgtaatatctaggggaggaaaaggtgatattactttccatattgctgggtgcagacacccctttatgatatggttcataatatccaagttggagagggtgatattacttcccatatcatgggaggtatacccttccctgtgatatggttcgtaatatccagaaggggagagattgatattactccccatattgtggggggcgtacaccttcctgtgatacggtttgtaatatctaggggatatagtgggtgatattactcaccatatcacgggggttgtaacatggtttgtaatatccaggggaggagagggtaatgttactccccatatctcggggcatgtacaccctcctgtgacatggttcgtaatatccaggtcgggagagggtgatattactcctcatattgccgggggtgtgttatggttcataatatcctggggaaggaggctgctatcactctccacatcttgggggatgtacactctcctgtgatatggttcataatatccagggtgggtgagggtaatattactccccatatcgcgggaagtgtacatacccctgtaatattgtttgtaatagaagagagggtgatattactccccacatcgcgggtggtgcccacccccctgtgatatggtttggaatatccagggggatgaggagggtgatattactccccatatctcggtgggagtacatccctctttgatcaagttcataatatccaaaaggaaacaggagagtgatattactccccatatcgccgggggtgtacacgggagggggagtacacccccggcgatatggtctgtaatatccagggaaggagaggagggtgatattactcaccatatcgcaggtggtctacatttacctgtgaaacagtttgtaatatccagggggggaaatgagaatgattttttttttttgagtctcactgtgtcacccaggttggagtgcagtggcacgatcttggctcactgcaacccccgcctcctggactcaagcaattctcctctcccagcctcctgaatagctgggactacaggcgcaccccacaacgtctggctaatttttgtatttttattagagacggggtttcaccatattggccaggctgatctcgaactcctgaccctgtgatccatccgcctcggcctccaaaagtgctgagattacagatgtgagccaccacgcatggcccaaggagaacgatattactccccatatcccagggggtgtatatccccctgtgatatggttcagaatatccggaaggaaagacagggatattacttcccatatcgcaaggggtgtgacatggttcgtaatatcccatgggggagagggtaatattactcttcgtattgtgaagggcatacactcccctgtgatacagttcataatattccggggagtagaggaagatattatgctccatatcgcgggtggcataagccccctgtggtttggttcataatatccagggaggagagggtaatattactccccatattgtggggacgtacaccctcctgtgatatggtttgtaatatcccagaggggagagagtgatattactccccatattgcagggacatacacccccctgtgatatggttcaaaatgtcttttttttttgaaggactggttctttatttcaaaaagacacttgtcaatattcattatcaaaacagttgcactattgatttctctttctcccaatcggccccaagtagaccacatcaaaggagagtacatattaagccaataagctgtaggatgtacacctaacagacctcctagaaaccttaccagaaaatggggacagggtagggaaagaaactttaaaagatcaacaaactgccagcccacggactgcaggggctgtcacagccagatggggtggccagggtgccacaaacccaaagaagcaaagtttcaaaataatataaaatttaaaaagttttgtacataagctattcaagatttctccagcactgactgatacaaagcacaatgagatggcacttgtagagacagcagcttcaaactcagaaaagggtaatgagatgagtttcacatggctaaatcagtggcaaaaacacaatcttctttctttctttctttctttcaaggaggcaagaaaagcaattaagtgctcacctcaacataaggggaacatgatccattctgtaagcagttgggagggggtagagatggaacaaaattttggtctcagaggtcttgccatcttaatttggtcacttctaatgaaaaaaataaaaaatagaaataacattatccaaaggtatcttaaagctgaaaacttgaacagcacattttttgttgttgttgtttggctaactcctcctggaaccacctttctggcttagctagtactttgtacagagcaatgaggcttcccatagtggagtctccctgggctctgtttggctctcagcaaggcaggcctataccttttcctctcctccatggagagaggaatatgcattaaggtgaaaaatcaccttccaaaagtgagaaagggattcgatcgctgcttcagggctgtggtattatatggaatgttttacaaaaggttgctacaaaacaacaaaagaggtaattacaaaatgtgtacatcacaacatactttttaaagacattatgcattgtgctcacattcccttaaatgttgtttccaaaggtgctcagcctctagcccagctggaatctccgggaagaggcggacagtttggtgaaaaagacacagggaaggagcgggcggcggaaggagggggcggcgaaaggagaaagcagccttccagttaaagatcagccctcaattaaaggtcagcttcgggcaggctggcctcaggcggagtctggttcagagggaggagcagcagcagggtgagactgaggcgttctacatctcattcaggtcaagcagagtctggtccagcatcctttgtgtacagaggtgctcccctttggtgcatttcagtttatcttccaagtcatcaattgtcttttccagcttggctaccgatctctcagcaaactcagcatgggtctccgcctcctttattttatcagtaagaatcttgatctcttcctcatatttgtcttctttttgagagtacttttcttcagcagcactcagacacttcaggttctggtccatcagtctaatctgctcatccatctctcggcaaagggattctgccagctcagctcgttcctctgtgcgttccaagtctccttcaatgatcaccaacttacgagccacctcttcatacttcctatctgcctcttctgcaatgtgcttagcttctctgagttggatttcctggagttccatcttttcttcatcttttaaggcccggttttcaataaccttcttacctctctcactctcatcagcagctttttccgcttcttccagcttttgcagggcagtagccaggtgctcctgagcacggtccagctcctcttcaaccagctggatcccacgttcaaggaggccacctcagcctcagcctgttcccgggcccacctttctccctcaacttctcgctggaggcgctcagctcgctcctctgcatcatctgcctgctgctgcagaacctggatcttgcgcttcaccgcctcgatggtggtgatcccagccatggtgcccacccagctactgctagagctccggttcctgcctcctccgatcggcgttgcagcctcctctcacccttacttccgcctcggttcaaaatatcttaagggaaggagttgatattactccccacatcacgggaagtttacatcccctggtgatatggtttgtaatatcccagggtggatagggtgatattactctccatatcgcgaaggagtactcccccctgtgatatggttcataatatccttggggggagagtgtgatattactccccatatcgcgagggccatatactcctttgtgacatggttcgaaatatcccggtgggggagggggtagagggtaatattactccccatacagcgaagagcatacgcccttctgtggcaaggttagtaatacttcagggaaaagagtgcaatattacttttcatattgcagggaacatacactcccctgtgacatggttcgtaatatcccgggggctgagagggtgatatttctccccatatcaccgggggcctacacctgggtgtgatatggctcataatatacagggagggagagggtgatattactccacataccgagtgaggggttacacaccctcgtgacatgttcgaaataccccaaggaggagacaatgatattactttccctgtcgcgggggctacaccctcccagtgatatggttcacaatatcccggggtggagagggtgatattactccctatatcaccggggggtgtacacttccctgggaaatggtttacagtatccccggggggagagggtactattactccccatatcacgttacatatcagggtacacccccacgtgatatggtttgtaacatcccaggaggaagaaaatgatattactccccatatcgcggtggcatacacccctccccgttaaatggttcataatatcttggggtggagagggtgatattactccccatatcacgtggggcatacaccccactatgatatggttcataatatcccggaggggagagggagatattactctccatgtcgcggggggcatatacacccctgtgatatggtttgtgatatcccgggggcggagagggagatattactctccatatcgtggggtcgtacacttttctgtgatatgattcgtaatatccagacggggagagggtgatattacttcccatattgcgggggcgtacacccctctgtgatatggttcataatatcccgaagaaaagagggtgatattactcctcatatcgcggggaacacacaccaccctgtgatatggtttgtaatattcagcgggggagagagtaatattactccctgtatctcggatggcgtacactcccctgtgatatggttcataatatccagaagaaaagagggtgatattactccccatattccagggaatgtacaccaccctttgaatatggttcgtaatatccaggaggggagagggtaatattgctcccaatatcgaaggaggtgttatacggttagtaatatccagagaaggagagggtgacattactccccacatcgtggtgggtgtgcacccacctgtgatatggttcataatattcaggttaagagaggtgatattgctttccatatcgccaagggtgtacactcccgtgaaatacagttcgtaatatccaaaaggggagagggtgatattactcccatatcgtggggggtgtacacccctctgtgatatggttcataatatccagggtggaataaggtggtattactccctgtatctcggggcatgtacatcgcctgtgatatgattcataatatccagaagaagagagggtgatattaatctccatattgctgggggtgtacaaccccctgttgtatggtttgttacactgagttggggagagggttacattactctcaatatcgagtggggcatacacacttatgtgatatggttcataatatcccagggaggagagggtgatattactccccatatcgcgggaggcatacaccccaatgtgatatggtttgtaatatctacatttttttttttgagacgaagtctcgctcttgtcccccaggctggagtatgatggccggatctcggctcactgcaacctcagcctcccgggttcaagcgattctcctgccttggtcccccaagaagttgggattacaggcgcacaccaccacgcccggctactttttgtatttttagtagagaaggggtttcaccatgttggccaggctggtctagaactcctgacctcagatgatccacctgcctcggcctcccaaagtgctgggattacaggcgtgagccactgcacctggcctggtttgtaatatctatgaagggggaaggtgatattactttccatatcacgggaggcgtacaccacgatgtgatatggtttgtaatatccagggggtatactgggtgatattactccccatatcgcggggagtgtatacccttttgtgatatggttcctaatattaagctgaggagaaggtaatattactccccatatcgcaggggtttttatatggttcataatattcaggaagagagagggtgacattactctccatatcacggggtgtgtactcccccatgtgatatggtttgtaatatccagggaaggagaggttaatattactccccatatcgcagggggtgtacacctctctgtggtttgtaatatccaaagggaagaggatgatattatcttcaatatcttggggggatacagtccccagtgatattgttcataatatccagagggggaggggatgatattactcccaatattgcaggtggtgtacaaccccctgtgatattctttataatatagagggggatgatgatattactcccaatatagtaaacaacctgtgtgtacaccccctgtgatattgtttataatatccaagggtggaaaggatgatattactcctcatatcgcagggggtgtatacccctctgtgacattgttcctaatattcaggggaggagaagatgatactactcctcatatcacaggggatgtacacccccctgtgatacttttggtaatatccaggggaggagaaaattatattattccccatgtcacagagggtgtacaccccgctgtgatagtgttcataatatccaggtgaaaagaggatgatattactccgaatatctcaggaagtgtacacccttctgtgatattgttcataatatccaaaggtggagaggaggatactactccccatatcgcagtgggtgtacacccccctgtgatatggttcataatatccaatgtaggagaggatgatattactttccatatcgcggagagtgtacatccccctgttatattgtttgtaatattcagggagaaagaggatactactactccccatatcacacggggtgtatattcccctgtgatatggttcctgatatccaagagatattataatcctctcttggattatgctacctctcatatcgcatggggtgtacacacactttgtgatatcgtttgtcatatccaaggagggagaggattatattaatcccaagatcacggggggtgtacaccctcctgtgatattgtttgtaatattaaggggggagaggataatattactcccaatataattaacaccctgtgtgtactcctccttgtaatattgttcataatatccaatgggggagacgatgatattactttcaatatcgcagaggatgtacatccctttgtaacaatgtttgtaatataaaaggcaagagaggatgatactacttccaaaattgcaggacatgtacaccccccggtgatattgttcctaatatccagtggggaagaggatgatagtagtcccaatatcgcaaagggtgtacacaccccctgggatattgttcctaatataaaaggaggagaggatgctattattcccaatatcacagaaggtgtaaaatcccctgtgatattgttcgtaatattcaggaggggagaggattatattactcccaatatcacagggtgtgtacacagggaggggcaagggccagaagcgggcgggaatccccatgtttgggcggacccagtttctaatggccagcatttgccaatcaaagcttaccagagaactctaaaagccagggctttcctgctagacaagactcatttctggaactgctttaaaaagaaacaaaacttcccaaggaccccttttcctctctgtctgcctaaaataatgttttaaaaactcctaaagcagctgaattcagcccccttcctgggggaatgtatagacggaactcccacctttcccggcatcccaaggccagagtatgtgaaactcctgggtctctatgtgtgtctgagcggctgctctgccaacactccacacagccctgtgtcctggacccaaggcccttatgacctgagctcaagaggggatctcctgatccatgggttgcaaagatccatgggagaagcatggtttctggggcggggtcacacgctcagtcactgtttccctcggatgccggagatggttcctttggctctctgccaatacagggtgaatcatcatccatccctcttttctttgttctcccgggtcaagttgtttgcctagtcagtcccaatgtgagaacctgaatatttcagttgacgcgctgacttcaaaatccccgggcttcgggaggcggagcttgcagtgagccgagatcccgccactgcactccagcctgggcgacagagcgagactccgtctcaaaaaaaaaaaaaaaaaaaaaaaaaaaaaagtccccgggcttttcttttcactcagtggaaggcagctgcttctaattggccatcttggcccgcccccaccacgtgaccttctgtaaaatgcctccactctccaggaacgctctcattatataactttgcctgaaaccaacagcacgctcattgcacatatcatgggctcatttatttcacttataaagaacctggccaaggaagagatagtgcctaaagtggccagtattctgaccgatatgttagaaaaatggtgtgccgaccaattcatgacatgtgtcccaaaactagcaacggaaattgtattcgccgtgttgaggtctctaatccagatgatgctcatctatgtactggaaaaggcagagtcctttcctgacaagctgctgaaactcttcagaaacatctcatatttcctgaagaagatgatgtctggacaagcagcacaggtcgttcagatttaactttctattcatatatccagcacgatattcgcacaattgtcacgaaaccttaccagttgatgagtcctgcacatttcctttaatttcaggaggaagagggtaatccggatgagttttctgacctactctgctgctgtgattaaacaaccaccaggaaattttgacgacactgttctcctgagctcctccctttcctccgggaacaaaacaattgaatttacaaaaataaagtgttatttgactggagtgaggtctcatgtctgcttatgcggtggctcgctgctcagaacagggtgagtctctgggttgtgtgctgaggaggggaggctctcaatctggagaaaacccactgcaggggacacctccatggggtctgagggactgaggatgaggagccggactgggtctagggaaggaggaggtttcagagggtgaaattctggcactaaagcctgggggtgtttgggaacttcctccttccgaagaagtttcagggagggataaagacaaaccctgggctccttgaggggcccttactaatttgagaggactctatcgggaaggagagtgacaatggcctccttgaggactgaggcccctgaataaatgaggcccagatacagtccatgggggatgagaccttcaagggtcacattttggttgggacagaggaaaagtgcagctctgcagccgcagaggaaaacccggcagtgtgaaagcgaccttggaggggccctgtgcgctctgaatgcgtctgagcccccatcccctgtccccgcctctctttctggattcttccagctcggctgtctccgccatcttctgagcgctccaccctgacttattcaagtttcccttctgccttccaagtactccaaaatctttcagatctgtgtccctacccctgtttttagcatgtgttggggctccaggtccctgaaggtttctggcctgaaatccacctccccagcggagtggactgcgttctagagactccacactccgcgaggttcccaggcccctgagggacaaccgagtggcctgcgcacttcagggctccacactcggcaaggtctttcaagcccttggggtccccttcttagttttttccacctttctgggctgcagtcactccataaatgctgggatctgatccccacccccactctcgtttcctcaattctgcgggctacacgctctggcaaggtcctccgggccctggatcccctccctctccctatgcccacgctcctagtcagcccttctggggtccactattttcaggaactaaccgttctcatggagccttgctaaccggaaagctgtgtggaagaaaggctttgaggatagaggtggagatttggctcttccatagtgccactcacccaccccaccatgctgccactgccagacccggacccctgtttcagaacaagtgaccagattcgctcctggacagccctggacactggccttttctctgaaaactactcaccctttctctagtccccacttcatgccagcctcataccctcttccttcccccacgctggcttccgggatcctcctctgctcagacaacctcttctgtgtcccacccccgtttttagaatgctttggggcaccaggttgggggaaggtttctggcctgatatccatctctttccaaactcccttcttcccttgaaaggcttcttgccttcagccccacttctggctccgaggtttcaggacaccctcctcttcatcctcattcttttgaccaccagctttttaggaattcgaacgtccctctcatcttcgtgaatcctgtccaggcatttgttgaccccttcatctgatacccctgacctcacattgccaaaagtctacccctacccagtacactggaattagacaaaatcccaggagttttacctcaactctgagtgtgcccacaggagctctccctgaagccacgtccttttaagcagggtctagggttcctcccttgtcttaatgaactctttgtcacacggaggacgttatggagcccttatgatctttcactgcctttctgcccagcgttttgtctttccatggacatttataatattttccatggacattttgttctctcaatgtccacccctaatttccaacatcccaaagattctcatgtgtttcctgaaagccatttacaggaatggctgtgcccagacccccttccccaggatcctccttcacacctggtaggtgcctctcctagagagatttgcactcagttgtcgtgcagtcacatggcccagatggttgttaatcacccccttcctggcaacagctagcagccagggaatcactggcacagaaacctcagggtgaccaagatgaggccacctctgtgctgaaggctgtgctccagagcctgcttgggatcaggcttaagcaggtcttcagccagacctgatgttacctggtttccttgagctgccctgcctgagctatcgggagcactccctcaatgcacatcttgattccctatctcatgctctgcttctagaaaccatgagctatcaattgctactggcaatggtcctgggaagtcaaccctaagtatggattctggggttggatgactccccacaggacttcagtgagcaacaatcactgctggcagttggaggacagagtcgctagggcatgtgaccactgtgaaaccaccgatgtttcacctggggtaattttggatgaactacggtagaagcactgaaggtacattgcttttggtttggaagattgtaggtaaataatagcgatatgaatgtggaattggatggctgcaaacgagtgccattgatgcattgaaagaggaaaagtcaggctgtcacctgtcactcagcaatttaaagtgtgagagttgggactagatgtggtggctcacatctataatccagagattcgggggaagcttgaagaggtaggatcttttgagtccaggagttccagaccagcctggacaccagagcaagacctcatctctacaacaaaattttcttaaaaattagatgggcttggtggcacgcacctgtacttgtagatctagctaatggggagcatgagataaaaaaatcacctgagtcagggacttaggggttacaatgaggtatgattgtgccagtgcacacactcccacctggccaacagagtgagattctgcttccaaaaaaataagaaataaatcaggtttgagagttggaaagcatcatcttctcctagagccaaaggacatgtacaactgagacccaggaacaaagcttcatcacaaagagaccatcatcagtggagccgggagatgcattccccctcaccctgccttgaggaggcagtggagtcatctgtctgggatcctttctgacccagccctatttgtttgtctctttggcttctttggatttgtatattttagctgttataacactgtaaaacaaacagagtgatttttttgagttgtgtgaatgatgctagctccatagtcaccctgagagtgatgggaacttttgaatttgtggcaagttggagggtagtgtaagtgacctgagattgccaaattggggctagcactggatgtgaggttaggctagtggaaaaatatgcccagaaccagaggagtgtgggctcactgcaggtggttaggctcagatccaaattgtacagatggatagctttggggtaaagaataacatagttgagaagtgcatgtgttagtctgttcatgcactgctataaagaattacctgagactgggtaattatttataaaactcaggtttaattgggtcatggttccacaggctgtacaaaaagtatgatgctggccatcagctcaacttctggggaggccccagaatagttagagtcatggcaaaaagtacaagggaagcaggctcatcttccacggccagagctggagcaagtggtaggagaggtgatacacactttcaaacaagtaggtcttttgagaactccatcaccggacagcacctatgggatggtgctaaattattcatgaaatatccgcctccataatccactcaactgtcaccagcgcagccagccccacctccaacagtggggattacaattccatatgaggtgtgggtggggacacagctccaacctcaatcagtgggcatcctggattgggtctactatagaaggagaaccaggagctgactatgatcttgaaccctacccatgatggccgggcggggtgactcatgcctgtaaccccagcactttgggaggctgaggtgggtggatcgcctgaagtcaggagttagagaccagcctggccaacatggtgaaaacctgtctctactaaaaatacaaaaaattagaccggcgttgtgctggatgcctgtaatcacaccactacgctccagcatgggaaaaaataccaaaacttcgtctcaaaaaaaaaaaaaaaaaaaaaaaaaaaaagactgcccatgaccactgcaccagtgagagggacaccagcatcactgagatgcaagggctggacattcttcataggtcagagctcaaagcaggggacactgatacagagatgggctccatccatagcaccaaagtggtgagaggatgtgggaatggcagaggccagcactttgccatcaatgcaagggggtataaggaggtgacaccagtgccagagtacatcacggggggactgccctacaatatctaggacttacctcttagagcgtgtttcattagcgacaacagatataaatggcagacaggtgtgtccctgcattaacaggaaatagaaatcatcaagaggaacagaaggcagatgtcagcagccccttagaaagtcatcatccttcatacagttaaaatctgagacagttctcacacgagaaggcctaactcaaaaagaggctgggttctcatgaggcaggtttatgcaaaaccaaggaaggtgtacaagtttggaattctccagtttcccttggaaaagacctacagtcatttgcttaggtaactgagcactgaacaaaggtgagtattgttgtcttttagaagctcttggccaagaaggccttgttggcataaaacccatggtttggaaacatcaccatgacccctgttagagtaatggcctaagggtgggggtcaggaaattgatgtattccttgccaacttctgcctctaagtgagtgaactctgtttgtgaacctctctcctctgtggttatgttcctaggctctcatgtataatcaggagtcatagacttagaaacaggaaaaatacttacagtgtttttgtggcctgtgagctatgacttataattttaggaaaaaaacaattgcaaatggaaagcctaagtctatcaatgctcatccaagacaacataatcaataaaaaccaatatcaaatctcaaggcaaattatttcctgtatatagatggcagagatgagcaccaccatcaaaaactcaaggaccagtgctgtgggtccagtcatctgtttcatggaattcaccagtctggtatcttcaaaatccagaaggatgatggcagatggcaggaaagtaatgcaaacgtcatcaggtgtgaccccactgtagcagctgtgatggatgttttctctcaccatagcaataaataacacaacctcggtcacactgtatgcattgttggtctgcaaaatccatgttttgcaaaactcttcaggaaggtggatctgtaatattggcattgacatgagaacaacagcagtatttattcacaatctcaagctctctgtcttcccgtctctctcattagccatccaagtagtcctgaggaaccaagcccatcagaacattctgcaacataatacacagctccattctccattcaaattttgttgttgttgttgttgttgatgagacaacatcttactccatcagccaggctgacgtacagtggggctatctgggctgactgtagtcttgagcttccaggctcaaggcatcctctcacctcagcctcctaagtggcttgaactacagacacacagcgacatgctgggctagtttttgtatattttgtagagacgtgctctcaccatgttattcaggctggactcaaactcctgagcgtaagtgatccaagcaccttggcctcaaagtgctgagattacaagcctgagccactgcacccagcccaatctccattctactgataacaatgtcattaccaggtctgatggacaggaaatggtaaggtttctgaaaacctaaggatcacacagcgagttccaaaggctgaaagtgcatacctgtcgacactgataccaatgacatccaatggtgagaatgacattccttgtagtcctagctctgctcataacaaatctatactgaagtgtaagagtttgatggtcatggggattttccatgtctctgcctttcagcgatgtgccatatctgtgaagtgttcagaaatgcaacagcctgaggcatgctgggcatatcctctaataaaaaggaaaatgccattttatggtcctgtatttctacaagttggaacacatgggcctgtgatccagatgggggaaatgggaatattcccactcattcaccttcatccacgaagcccatttgaaagctttgggcttcccatccttgtagattttagtgttgtgggctgggtgcagtggctttcacctgtactgccaacactttgggaggcctagacaggtgaatccactgaggccaaaagttcgagaccagcctggccaagatggtgaaaccccgtccctactaaaaatacaaaaattagcaaggtattggggccagcacctgtaatcccagctgctcgggaggctgaggctggagaatcgcttgaacccaaaaggcagagactgcagtgacccgatcctgcctttgcactccacctgggcaagcagaacaaaacttctgtcttgaaaaaaaaaacaaaaaacgaacaaaaaagatgttagagttctgggtttagaggtctataccccagaaagagaatggtttcaacaagggacaaagaagttgctttaaacgttgacttgccatttcttttcagtgtgtttgttctcttgcgtcaagagaccaccagaaaagtggtgcaattactctcctgtcaagaatcattgactatcatctgcaagagggtcagatcctggtatataattagggcagaaatacttagtctgagaagggtatgacatccagaggccctattaatgatgtccttttctccatgcctgactctgaccccatgtgctggactgcccctgtgtggatggcctcatggcctgctcggactctgaggtcccaccccaagtggcacctccatggagggctctactcttgtatgggctctgacactcacactgagacactctcccatggacacctcttcacccacttggggtctgaaactgggctactccatccctccctaacctggaacagagagctttcactgctattacacaagtcatagaggctaactcctcatttttccaagctaattattgaaacattagtcctgggttgataagacaagataagttaacttttcataaatttgcttatcaagttttgaataaattcaaataaattcaccttccccacacaccttagttgtcgacatcacacgcgcacccatactcacagggtgagcacgaaggcttcactgtcagtggagaaagtggcaaaacccttctgtgcctcatcctggtctagacctggccctcatcctttcccactcttcccctcactcccttggattcatccacactggcctcctgcctgctgctccacctccctgcgaagctcacccctgcctcagggcctttgcacgtgcagtggcttcaagccatatcctcttcacccagatctcccagatctcctgaatgatcttcttttatcattcaggtctcagcttgcatgtaatcttctcagtgaggattacccaaaccacatagttcattcattcattcaaatattcattcaatggcatattgacaaagcagctacttcatgccaggccttgggccaggtgttatggatatggcaacaaacaaaacaagagttttctgctctcaaatttttacccacttaaaggagatatcatacatcatctgtaaataaatacatcatctgtaaataatgatgtaaataaatacatcatctgtaaatctgtaaataatgatgtaaataaatacatcatctgtaaataaataaagtataataaaagaaaatagtaggtttttttggttggaggtgaccgtgaagtttgcaaataccatcttacaacacattattttattttatttcatttcatttttaattttattattattatactttaagttttagggtacatgtgcacaacgtgcagatttgttacatatgtatacatgtgtgaagttggtgtgctgcacccattaactcgtcatttagcattaggtatatctcctaatgctatccttcccccctcccccaccccacaacagtccccggtgtgtgatgttccccttcctgtgtccatgtgttctcattgttcagttcccccctatgagtgagaacatgcggtatttggttttttgtccttgtgatagtttgctgagaatgatggtttccagcttcatccatgtccctacaaaggacacgaactcatcattttttatggctgcatagtattccatggtgtatatgtgccacattttcttcatccagtctatcattgttggatatttgggttggttccaagtctttgctattgtgaagagtgccgcaataaacatacgtgtgcgtgtgtctttatagcagcatgatttataatcctttgggtatatacccagtaatgggatggctgggtcaaatggtatttctagctctagatcactgaggaatcgccacactgacttccacagtggttgaactagtttacagtcccaccaacagtgtaaaagtgttcctatttctccacatcctctccagcacctgttgtttcctgactttttaatgatcgccattctaactggtgtgagatggtatctcactgtggctttgatttgcatttctctgatggccagtgatgatgagcatttcttcatgtgttttttggctgcataaatgtcttcttttgagaaatgtctgttcatatccttcacccactttttgatggggttgtttgtttttttcttgtaaatttgtttgagttcattgtagattctggatattagccctttgtcagatgagtaggttgtgaaaattttctcccattctgcaggttacctgttcactctgatggtagtttcttttgctgtgcagaagctctttagtttaattagatcccatttgtcaattttggcttttgttgccattgcttttggtgttttagacatgaagtccttgcccgtgcctatgacctgaatggaaatgcctgggttttcttctagggtttttatggtttgaggtctaacatgtaagtctttaatccatcttgaattaatttttgtataaggtgtaaggaagggatccagtttcacctttctacatatggctagcctgttttcccagaaccatttattaaatagggaatcctttccccacttcttgtttttgtcaggtgtgtcaaagatcagatagttgtagatatgtgacattatttctgaggactctgttctgttgcattggtctatatctctgttttggtaccagtaccatgctgttttggttactgtagccttgtagtatagtttgaagtcaggtagcatgatgcctccagctttgctcttttggcttaggattgactttgcaatgcggggtcttttttggttccatgtgaactttaaagtagttttttccaattctgtgaagaaagtcattggtagcttgatggggatggcattgaatctataaattaccttgggcagtatggccattttcacgatattgattcttcctacccatgagcatggaatgttcttccatttgtttgtatcctcttttatttcattgagcagtggttttagttctccttgaagaggtccttcacatcccttgtaagttgggttcctaggtattttattccctttgaagcaattgtgaatgggagttcactcatgatttggctctctgtttgtctgttattggtgtataagaatgcttgtgatttttgtacattgattttgtatcctgagactttgctgaagttgcttatcagcttaaggagattttgggctgagacaatgggttttctagatatacaatcatgtcgtctgcaaacagggacaatttgacttcctcttttcctaattgaataccctttatttccttctcctgcctaattgccctggccagaacttccaacactatgttgaataggagtggtgagagagggcatccctgtcttgtgccagttttcaaagggaatgcttccagtttttgcccattcagtatgatattggctgtgggtttgtcatagatagctcttattattttgagatatgtcccatcaatacctaattattgagagttttcagcatgaagggttgttgaattttgtcaaaggccttttctgcatctattgagataatcatgtggtttttgtctttgggtctgtttatatgctggattacatttattgatttgcatatattgaaccagccttgcatcccagggatgaagcccacttgatcatggtggataagctttttgatgtgctgctggattcggtttgccagtattttactgaggacttttgcatcaatgttcatcaaggatattggtctaaaattctcttttttggttgtgtctctgcctggctttggtatcaggatgatgctggcctcataaaatgagttagggaggattccctctttttctattgattggaatagtttcaggaggaatggtaccagttcctccttgtacctctggtagaattgggctgtgaatccatctggtcctggactgtttttggttggtaagctattgattattgccacaatttcagatcctgttattgctctattcagagattcaacttcttcctggtttagtcttgggaaggtgtatgtgtccaggaatttatccatttcttctagattttctagtttatttgcgtagaggtgtttgtagtattctctgatggtagtttgtatttctgtgggatcagtggtgatatcacctttatcattttttattgcatctatttgattcttctctctttttttctttattagtcttgctaccggtctatcaattttgttgatccttttaaaaaaccagctcctggattcattaattttttgaagggttttttgtgtctctatttccttcagttctgctctgattttagttatttcttgccttctgctagcttttgaatgtgtttgctcttgcttttctagttcttttaattgtgatgttagggtgtcaattttggatctttcctgctttctcttgtgggcatttagtgttataaatttccctctacacactgctttgaatgtgtcccagagattgtggtatgttgtgtcttttttctcgttggtttcaaagaacatctttatttctgccttcattttgttatgtacccagtagtcattcaggagcaggttgttcagtttccatgtagttgagcggttttgagtgagtttcttaatcctgagttctagtttgattgcactgtggtctgagagacagtttgttataatttctgttcttttacatttgctgaggagagctttacttccaagtatgtggtcaattttggaataggtgtggtgtgatgctgaaaaaaatgtatattctgttgatttggggtggagagttctgtagatgtctattaggtccgcttggtgcagagctgagttcaaatcctgggtatccttgttaactttctgtctcattgatctgtctaatgttgacagtggggtgttaaagtctcccattattattgtgtgggagtctaagtctctttgtaggtcactcaggacttgctttatgaatctgggtgctcctgtattgggtgcatatatatttaggatagttagctcttcttgttgaattgatccctttaccattatgtaatggccttttttgtctcttacgatatttgttggtttaaagcctgttttatcagagactaggattgcaacacctgcctttttttgttttccattttcttggtagatcttcctccatccctttattttgagcttatgtgtgtctctgcacgtgagatgggtttcctgaatacagcacactgatgggtcttgactctttatccaatttgccagtctgtgtcttttaattggagcatttagcccatttacatttaaggttaatattgttatgtgtgaatttgatcctgtcgttatgatgttagctggttattttgctcattggttgatgcggtttcttcctagccttgatggtctttacaatttggcatgtttttgcagtggctggtactgactgttcctttccatgtttagcgcttccttcaggagctcttttagggcaggtctggtggtgacaaaatccctcagcatttgcttgtctgtaaaggattttatttctccttcacttatgaagcttagtttggctggatatgaaattctgggttgaaaattcttttctttaagaatgttgaatattggcccccactgtcttctggcttctagagtttctgccaagagatcagccgttagtctgatgggcttccctttgtgggtaacccgacctttctctctggctgcccttaacattttttccttcatttcaactttggtgaatctgacaattatgtgtcttggagttgctcttcttgaggagtatctttgtggcattctctgtatttcctgaatttgaatgttggcctgccttgctaggttgcagaagttctcctgggtaatatcctgaagagtgttttccagcttggttccattctccccatcactttcaggtacactaatcaaacgtagatttaatcttttcacatagttccatatttcttggaggctttgtttgtttctttttactctctttcctctaaacttctcttctcacttcatttcattaatttgatcttcattcacttatatactttcttccacttcatcaaatcggctactgaaggtattgcatgcatcatgtagttctcatgccatggttttcagctctatcaggtcatttaaggtcttctgtacattgttttctctacttagccattcgtctaatcttttttcaaggtttttagcttccttgtgatgggtttgaacatcccctttagctcagagatgtttgttattactgaccttctgaagcctgcttctgtcaacttgtcaaagtcattctccatccagctttgttccattgctggtgaggagctgcgatcctttggaggagaagaggtgctctggtttatagaattttcagcttttctgctctggtttctccccatctttgtggttttatctacctttggtctttgataatggtgacctagagatggggttttggtgtggatgtcctttttgttgatgttgatgctgttcctttctgtttgttagttttccttcgaacagtcaggttcctcagctgcaggtctgttggagtttgccggaggtccactccagaccctgtttgcctgggtatcaccagcggaggctgcagaatagcaaatattgcacaacagcaaatattgctgcctgatccttcctctggaagcttcgtctcaaaggggtgcctggctgtatgaggtgtcagttggcccctactgggaggtgtctcccagttaggctagatgggggttagggacccacttgagaaggcagcctgtccattcacagagctcaaacactatgctaggagagccactgctctcttcagtgctgtcagatggggatgtttaagtctgcagaaatttctgctgccttttattcagctatgccctgcccctacagatggagtctacagaggcaggcaggcctcattgagctgcggtgggctcctcccagttcgagcttccagaccactttgtttacctactgaagcctcagaaatggtgaacacccctcccccacccagtctgccgccttgcagttccatctcagactgctgtgctagcagtgagcgaggctccatgggcgtgggacccactgagccaggcacaggatataatctcctggtgtgccatttgctaagaccattggaaaagcacagtattaaggtgggagtgtcccaattttcccagtacagtctgtcacgggttccctcatctaggaaaggtaaatcccctaaccccttgtgcttcccggtgacgcaatgccccaccctgcttcagctagccctccatgggctgcatccactgtccaaccagcccaatgagatgaacaaggtacctcagttggaaatgcagaaatcacccatcttctgtgtggatcaggctgggagctgcagaccggagttgctcctattcggccatcttggaatggcaatctatgtttgctttttacatttgaaaaaactggtgtcacgtacctaggtattaatcattgtggtatcctcttgccgatttacctctttatcattaactagtgaccctccttgtcttttgttgttacagtctgtgattttagtctattttatctaatatgagaatagctactctggcacttttttggtttccagcttcatgaaatatccttttccatttccctgttttcatttccctttcggtgtctctatagatgaagttgatttctttaaggcaccataagttgggtcttatttctttatccatttgaccatttagagaatttagaacactgtcagtgttattattcataagtaaaaacttaagagtgggtgtagtggtgtacatctgtatttcctgcactttgagagactgaggcgagctgatctcctggggtcaggagtttgagaccggcctggtcaacatgatgaaaccctgtctctactaaaaatacaaaaattagccaagcatgctggcatgtgcctgtaatccaatttacttgggaggctgaggcaggagaagcttgaacctgggagacaaatgttgcagtgagctgagatcacacagagaagtcatctccactctcctcatcagaacctcttgttcacagcatttgtgagcacaaatcaatgatggttattctttcctactaattagggatattttattacacagcaatagcctccagcaaagggaaccatcatacatgattcctacaagttgacagggctggaattatcactgaaaaactaaggtggctatacttgattcccaatgtccaatttttcatgaatagagaaatttatcctttttccccccagccagaaaccaagttttgctcttacgcccaggctggaatcaagtggcacaatctcagctcactgcaacctctgccccccagcttcaagaaattcaccttttgaacaaggagatattaaggatacactatgtgtatgctaccggtggttgcaggagactcagaaaagagagaaacagtcactggcctcgtgcaactgatattctcgggaggagagaaaggcaatcaagaaagaaacatgctgtatttcagacagctgtaagtcctccacaagaaaagaaagcaggtgaggaacataggaaatgtgtcaaccataaggttcccgctaattctataagttggtcagggatatcctccaagaataagcagcatctgagcaatcacctgaagggaggaaggaaggaagactgtgagtggtggcttacacctgtaatcccagcactttgggaggccaaggagggcagattgcctgagctcaggagttcacgaccactcagagcaacctgttgatacccaatctctactaaaaacacacaaaaaaattacccgggtgtggtggcacgcacctgtagtcccagcttccatgcccagctgatttctctctctccatatatatatatatatacacatatattgtttttgcagagatagggtctcactgtgtcacccagtcatcaagcaattctcttatactgttttggaaaagcatgggaattacaggtgtgaaataccctgctggtcctgaaaaatgtgatatttgggattctctgcctggcttgttttacccaaaataatgacctccagttccttccaggttgctgcaaaagacatgattttcactgttttataactgaatagtattcctgtatgtatacataccacattttctttatttattcttctgttgattgacatgtagggtgattccatgtctttgctactgtaaataatgctgcagcaaatatttgtgtgcattttgatctattcctttgagtaggtacccagtactgcaactgcaggactgagtagttgttatattttttgttctttcagaaatctccatagtgtttgccataaaatctgcactaatttacattcccaacaacaatgcataagatttccccttttctccacattctcactaacatttgttatgtttttgtctttttcataatacccattctgactggagtaagatatctcattgtggtggttgttgatatttttgagacggggtctcactctgttgccagactggagtgcagtggtgtgatcgtggcttgctgcaacctccacctcccgggttcaagcaattctcctgcctcagcctcccgagtagctgggactacaggcgcgtgccaacaggcctggctcattttttgtatttttagtaaagacagggtttcaccatgttggccaggatgatcacagtctcttgagctcatcatacacctgcctcagcctcccaaagtgttggaattacagtcatgaggcagcgcacccaacctcaatgtggttttaatgaccatttctctgacgattcatggtgtggagaatttctttgaaataccttttggccatttatatgtgctcttttaaaaactgactcctgtccaggtgcggttgagcatgcctgtaaccccagaacttcgggaggctgaggccaatggatcacttgaggcaaagaggcagaaatcagcctggccaacaaggcaaaaccccatctttactaaaaatacaaaaaatcagccacgggctgtgactcgtgcctgtggtgcaagttactcaggaggttaaggcacaggaattgcttgaacccggtaggcacaggtcacagtgagccaagatcatggcactgcactacagcatgggtaatagagaaagacctgtctcataaaaacaaatgaataaataaataagataaaaaataaaaaagtctctttatgtcctttgccgactttttaatgggattctttggagttttctgttgtagttgagatctttgtttactctcggtattagtcttttgtcaaaggaaaagtttacaaataatttcttccgttctgcagtttgtctgctcactctgttgagaggattatttctttggctgtgcagcagctttttgtttcagtaaagcttttgaatttatataattaaaattttcagtttggtttaaatttgcactggtcgatttttggttttgttgcctgtacttttgaagtcatactcttgaactctttactagacaataaccagaagagttttctctagttttcttctcacatttttattatttcagtacatatatttaagtctataattcatcttcaattgatttttgtagaaatagtgagaaataggagtccaggtttattcttctgcaaatgacaattcaattgttccagcaccaattattgaaaagggtgtgctttcctcaacgtatattcttatcagctttgtcaaagatcagttggctataaatgtgtggctttctttctgggctctctagtctgttacatcaatctgtgtgtctatctgtatactactaccatgctgtattggtgatgatggctttgtaatataatttgaagtcaagaaatgtgatgctcccagctttgtttatttgcttcagaaaggctgagtcaacagctgcagagatgaagctgcccctcctcgcagggctccttcccggaaaaagatcatggctcccactgaccatataaccatggctggaactcctgaaattcccaaagggaggccctacccagtgaggggggatgaatgaaggtcctacttaaggaatctgtctggccacaatcaggcacagcagctgtgctgccttgtgggggaccagaccacctggattccctggagcctgcaggctagaatgtctgagtccatggaaacacagaaatggaggccgccctcacctccccagaaaactgtagtctcaggcagtctccagccgattgccactggttggctgctattccaagccagtgggtcttaacttgagaggtgctgtggaagtggggcccacggaatgaggctgcttggctccctggattcagccccttttctaagggaatgtacagatggaactcccgccttgcccagctttccaagtatataaaactcctgagtctctgtgagtgtctgagcgagtgctctggcaacattcgacacggctctgtgtatctgacccaagacccttatggcatgagctaatgggaggatcttctgatccatgcgtggcaaagatgcatgggagaaacatggtttgtgggtaggggttgtgcattcactactgcttctcttggctgtaggtgaaggtttctttggctctgtgctgatactgggtgcaccatcacccaccccctttgtttcttctcctgggtcaagtcatttgcctaatcagtcccaatgtaggaacctggatacttcagttcaaggtgctgaattcaccgtgcttttcattcaggggaagacagctgcttctcattgggcatcttggcctgcccacttcacgtcactttttgtaaaatccacaccactccaggaatatccattacttaacttcgcctgaaataaacagaaggctcattacacttatcatgggctcacttacttcgcctataatgaaggtgccatggaaatgctagtggatgacgtggtccattttcttagggatgagatagaaaaatggtgtatggctttttaatttaattaaaatttttagtttggtttaaatttacattggtctctttttggttttgttgcctgtacttttgaagtcttactcgtgaactctttactggacaatgaccagaagagttttccctaagtttcttctgatattttgaccatttcagtacatacatttcagtctataattcactttaaattgatttttgtaaacatggtaagaaataggagttcagatttattcttccgcatatgataatgcaactgtcccagtaccaattattgaaaagggtgtgctttccctagtgtatattcttgtcagctttgtcaaagatcagttgcctatgaatgtgtggctttcattttggattctctcgtctgttacatcaatctgtgtgtccacatttatacctgtaccatgctgtattggtgactatggctgtgtaatatattttagagttaggaaatgtgatgctcccagctttgttcatttgcttcagctgaaaaggttgagtccacaattacaaagatggcagccgcccatccccggaggacctccaacccagaaagagatcaggcttcccaccaaccctataaccctggctggagttcctgaaattccaacagggaggaccttcccagtgaggagggatgaatcaaggtcaaatttaaagaaacagtctggccactatcaggcacagcagcagtgctgccttgtgggggacccctcctgctccagaccagctgccctccctggagcccgaaggctagattgtctgagtctacggaaacagagacggtggccgccccaaccacccagaactcggtagtctcaggcacttggcttgctatcttgccactgcttggctggtattccaagcccgtgggacttgagaagtgctgtgatgatggggaccacaggatgaggctgtctggctccctgtgatatggctgtgatgagtggaggaacaccagggctcatgtctcacacagaattggagaaaatgacacaaacacatgtacagtggttttatggcgtgcagtttaataggcaagaacgaaggaagagctccccatactgagacagagggaggggggctccaaagccaaaagaggaaacccggagtgctgtggataccaatgagttatatgaagaaactggagggggcggtgtctgatttgcatagggttcaggcgattggttcgaccaggcatgtcatttatgtggcccacggaaaaactggccctcccacctagcctttgaatatgcacgtgccggacaccctgatttcctacactcatggggatatatgggggtggccatatcgccaggcacaggtggggacaagggccagaagagggcgggaatcgctatgtttgggtggacccagtttctaatggccggcatctgcagatcaaggttaccggagaactctaaaagccggggctttcctgctagacaagactcatttctggagctgctttaaaaagaaacaaaacttcccaaggaccccttttcctccctgtctgcccaaaataatttcttaacaactcgtataacacctgaattcagcccccttactgggggaatgtaccaacggaactcccacctttcctggtttctcaaggctagattgtgtaaacctcctgggtctcggtctgtgtctgagcagctgctctgccaacactccacacagccctgtgtactaggcccaaggccgccgtgactcagcccatgggaggatctcctgatttcttggttgcaaagatccatgggagaaaaatggtttctggggcggggtcacacactcatggcttctcttggctgtgcaagaaggttcctttggctctgttccaatatagcgtggttcatcacccacccctgttttctttgttctcctgagtcaagttgtttgcctagtcagtcccaatgtgagaacctgaatatttcagttcacgtgcttatcgtgaaattcactgagactttaattcagtggaaggcagcctcttctaattggccatcttggcccgccccctccacgtcacctcccataaaatggccacgctctccagggacgatgccattatatatctttacgtgaaaccgacagaacacttattacactttttgtgagctcatttacttcacttataatgaacatggccatggaaatgctagtggagaaagtggtcgattttctgatggatgtgataaaaaaatggtttgccgaccaattaatgacatatgtctcaaaactagtaacgagacccttaatcgctgggttgaagtttctaatcaagaagatgctcatctatgtattcaacaaagcagcttcccttgcttctgaaatgcttccaaacaacatctcatatttcctgaagaagataatgcctggacaagcagcacaagtcattcaggtttactttcagctcataaatccagcaggatattcgcacaattgttgggaaaccttatcagttcatgagtcgtgcatgtttcctttaatttcaggaggaagagggtaatctggaagagtttcctgacctactctgctgctgtgattaaacaaccaccaggaaattttgatgacactgttctcctgagctcctccctttcctcggggaagaaaagcattgaaactacaaaaataaagtgttatttggctggagtgaggtctcatgtctgcttatgcggtggctcgctgctcagaacagggtgagtctctgagttgtacgctgaggaggggaggctgtcaatctagaaaaaacccattgcatgggacacctccatggggtctggggggctgaggatgaggagctggactggatctagggaaggaggaggtttcagagggtgaaattctggcagtaaatcctgggggtgtttgaaaacttcctccctcagaaggagaagactcagggaggaataaggacaaaccatgggtcccttgaggggcatttactaacttaagaggactttatcgggaagcagagtgacaatggcctccttgaggactgaggcccctggataaatgaggcccagatccagatccagtccatgggagatgagaccttcaagggacatatttttgttgggacagaggaaaagtgcagctctgcagctgcagaggaagccttggcagtgtgaaagcgaccttggagggggccctgtgcgttctgaatgcttctgaggtccatcccctgtccccgcctctttttctggattttttgggctccatggtctccgccatcttctgagcgctccacgctgccaccttcagttttctcttctgggctccaaatactccaaaatctttcatatctgtgcccctacccctgtttttagcatgtgttgggactccaggtccctgaaggtttctggcctgaaatccacctccccagcggtgtggattctgctctagagaccccgcacttggcaaggttcccaggcccctgggggacaaccgagtggtatgtgcacttcagggctccacactcggcaaggtctttcaagcccttggggttccctcctcagttttcttcacatgtctgggatgtagtcactctataaatgccgggatgtgatccccaccccagtgattttttttagttccatgagtgttgctatctgaatagtcatcctgagagtgatgggaccttttgaatttgcagcaagttttagattagtgtgagtggcctgagatcgcaaaactggggctagcattggatgtgaggttaggctggtggaaaaatttgcccagaacctgaggagtgtgggctcactgcaggtggttaggatcagcacagaattgcaaggatgtatagctttggggtaaagaataacatggttcagaagtacatgtattagtcttttcatgcattgctataaagaattacctgagactgggtaattaattataaaaactcaggtttaattggctcatggttccacaggctgtacaaaaaggatgatgctggccatcagctcaacttctggggaggcgtcagaaaacttagagtcatggcaaaaagcacaagggaatcaggctcatcctccatggccagagctggagctagtggtaggagaggtgctgcacacttttgaacaatcagatctttttagaactctatcaccagacagcacctagaggatggtgctaaattattcatgaaatatccacccatatgatccactcaattctcaccggcccaaccaggaccacctccaccattggggattacaattacacatgagatgtgggtggggacacagatccaaactcgatcagtgggcatcttggactgggtctactatagaagaagaaccaggagctgactatcatccttaagactgcccatgatggccaggcagggtggctcatgcctgtaatcccagcactttgggaagccaaggtgggtgaatcccctgaggtcaggagtttgagaccagcctcgccaacatggtgaaaccctgcctctactaaaaacacaaaaaattagatgggtgttgtgccagacgcctgtaatcacagctactccagaggctgaggcatgagaattgcttgaacctgggaggcggaggtggcggtgagccccaatcgcactgctacactccagcatgggcaacaataccaaaacatcgtctcaaaaaaaaaaaaaaaaaaaaaaaaggctgcccatgaccactgccccagtgagagggacaccagcatggctaagatcaagtgctggacattcttcatgggtcagacattaaagcaggccacactgttacagagatgggctccattcatagcaacaaagtggtgagaagatgtgggaatggcagaggccagcactttgccatcaatgcaaggtgggcataaggagctggcaccagtgccagagtgcatcaggggaggactgctttgcaatatctagcacttacctcttagagtatgtttcattagggacaacagatataaatggcagacaagtgagtcccttcagtaacaggaaatagaaatcatcaagaggaacagaaacagatgtcagcagccctcatataaagtcatcatccttcatccagttaaaacctgagacagttctcacataagaaggtctaattcaaaaagagactgggttctcatgaggcaggttcatgcaaaaccaagggaagtatacaactttgggattctccagcttcccttggaaaagacctacaatcatttgcttaggtaactgagcactgaacaaaggtgagtattgttatctttcagaagctgttggccatgaaggtcttgctggcataaaacccatggttggaaacatcaccatgacccctgttagagtaatggcctaagggcaagggtcaggaaattgatgtattccttgccaacttctgcgagacgagtgttggtccactcatctctttcacggaattcaccagtctggtatcttcaaaatccagaaggatgatggcagatggcaggaaactaatgcaaacaccatcagttgtacctccactgtagcagcagtaatggatgttatctcttcattgtaatatccagggagggagaagatgacattattctcaatattctaaacaccctgtgtgtacagcctctgtgatattttttgtaatatccgtgtgggagagaattatattactcctaatatctcaggggttgtgccccctctgtgacaatgttcctaacacccaggaggggataggatgatatcacttttagcatcacagggggtgtacaccccactgtaatattgttcataatatccgggggggagagaatgatattactcccaatatcgcaaagactgtacaccaacctgtgatattatttgtaatatccataagaggaagaataatattactcccaatgtcacaggaagtgtacacccttctgtgatattgttcaaaagatccagttagggaggggatgatattactctcaatatcttaaacaccctgtaggtaagccctctgtgatattcctcataatatccagagggagaggatgatattactcccaatattgcatgaagtctacaccccacctgtgatattgttcctaatatccaggatgggagaggatgatattactcccaatgtcgcaggggatgtacaccttccctgtaatattgttcgtaatatctagaaaaggagaggataatattactttcaacatcgcagggggtgtacaccttccttgttatattgttgctaatatccagggaaaaagaagatgacattaccaccactattgcagaaggtgtacacccccccttgatatagttcctaatatccagaaaaggagaggagatattactccaaatattgcaagaggtgtacattcccctgtaatatttttcctaacattcaggaagaaagagagtgatattgcccttaatattgaagggagtgtgccccccccgtgatattgtttctaatatccaagaaatgaaaggatgatattactcccaatatcacaggggctgtacagccccctcccatgatattgttcccaacatcggggggggggtgaaatagtattattcccagtatcacaataggtgtacacacctgtcgtgatattgttcctaatacccatgggggaaaggacgatattattcttaatatctcagagggatgtacaccctccctgtgatattgttcctaatatccggggtgggagaggatgatattacccccaaaatctcaaagggtgtacacccctcttgtgatattgttcctaatatccagggtggagaggataatattattcccaatatccaggaaaggaaacgatgatgttactgtgaatattccagggggtgtcctcccctctgtgatattgttcctaatatccaggttggggagattatgatatttctccaaatatcacaaggggtgtacaccaaccctgtgttattgttcctaatatcgatggggggagaggacgatattactcccaatatcacagggggtgtacaccacctttatgatattgttcctaatatccatgaagaaagaggatgatattactttcaatatcgcaggggatgtacactccccctgtgatattgttagtaatacctaggagaagaaagtgtgatattactcccaatatcgcaggggatgtacacgcttcctgtgatattgttcctaatatttagggggaaaggggatgatattactcccaatatcgaatggtgtgtacacccccccgtgattctttttttttttttttttttttttttgagatggagtcttgctctgccgcccagactggcgtgcaatggcgcaatctcggctcactgcaacatttgcctcccaggttcgcacgattctcctgcctcagccttcggagtagctgggattataggcagctgtcaccataccaggctaatttttgtatttttagtagagttggggtttcaccatgttggtcaggctggtcttgaattcctgacctcaaataatccacccaccttggcctcccaaagtcctgggattacaggcataactttccctgtgatattcttcctaatattcaggaagaaagaggatgatattgctcccaatatcgcagagagtgtgcactcctcctgtgatatggttcttaatattcagaggaggagaggatgatattactttctatattgcagaaggtgtacacctccctcgtgatgtctttcctaatatccagtgggggagaggttattagtctcaaaatcacagaaggtgtaaacccccatttgatattgttcctaatattcaggggtggggagagaaaggtattactcctagtatttcagggcatgaacacccccaccgtgatatcattcctaatatccagaaggggaggcaatgatatttctcctaatatcacaaagggtgtacaccccttctgtgatattgtaaatattctgtgtgtacacccccctgtgttatagtctgtaatatccgggtgggggagagggtgatatttctccccatattgtaggggatgtacacccttctgtgatatggttcgttatatccagggaagaaaaaggtaatattgctgcccatattgtggagagtgtacacccccatgtaatatggttcgtaatatccaggagtggagagggtgatactgctccttacatcgaggaaggtgtacaccttattgttatatgattcgcaatatccaggggaggagagagtgatattgctccccatgtcgcagggggtgtaaaccctccgtgatatgattggtaatatccaggaaaggaaagggtgatatttctccccatatcgcgggggacgtacatcctcctgtgatatggttcgtaatatccaggaggaaagaggaaaatattgctcttcataacccgaggggtgtacaacccctgtgatatggttcgtaatacccagaagtgtacacccctctgtgatatggtttgtaatatccagggggttagagggtgatattgctccccatatcgcagtgggggtacacccccctggattggttcataatattcatggggggagaaatttacatttatcctcatatcagggggggtgtacaccccccgtgatatggttcgtaatatccaggggaagaaagggtgatattgctccttatatcgcggaaggatcaccctcccctgtgatatggttcataatacccagacgggaagagggtgatattgttcttcataaagcgaagggtgtacagccccctgtgatatggttcataatatgcaaaaggggagagggtgatattgctccccatatcacggagggtgtactcccttctttgatatggttcgtaatatccaggggtgtagatggtgatatagctcgccctattggggagggtgttcacccctctgtgatattgttcgtaatgtccagggaaagagaggatgatattactcccaatatcgcagaaggtttacaccactctgtgatattgttcataatatccagggaaggagaagacgatattactcccaatatggcagggggtgtagaactcctgtgatattgtttgtaatatccaggcaaggagaggatattactctcaatatcgcagaaggtttacacccctatgtgatactgttcatgatatccagggaaaaagaggatattactccctatatcacaaagggtgtacacccctttgtgatattttttgtaatatccaggggagagaggataatattactctcaatatcagaaggggtgaaaaccctcctgtgtcattgttcataatatttagggaaggagagagtgatattactccaaatatcacagtgggtgtacacccccctatgatattgttcctaatttccagaaggggagatatgatattattgccaatatcgcagaaggtgtacaccttactctgacattgtttgtaatatccagatggggaaatgatgatattactcctaatatcacagggggtgtacacccccttgttttattgtttgtaatattcaggggaagagacgattatattactcccaatatcgcagggtgtgtacaacactctatgatattgttcataatatccaggggaggagaggaagtgtacacccccccgtgatattgttcgtaatatccagaggtagagaggatgatattactcccaatattgcaggtggtgtacacctttctgtgatattgtcatgatattaagaaggggagaggatgatattactaacaatatcacaaaaactgtacactccctgtgatattgttcataatatccagaagaagggaggatgatattattctgaatctcgcagaagatatacaccaccctgtgatatggttcataatatcctaggggaaagaggatgacataactgtcaatatcgcagggggtgtacaattccctgtgatattgttcacaatattcagagggaaaaaggataatattactttcaatatcgcaggcggtgtacacattactgtgttattgtttataatatccggaatgagagaaaattttctcccaatatcacaggaggtgtacactcccctgtgatattgttcgtaatatccagggaggggagaggatactattactcccaacatctcagggagtgtaggccccccctttgatattgttcctaatattcggaagtggagaagatgatattacttccaaaatcgcagggggtgtacactccctctgtaatattgtttctaatattcatgagtggaaagaaagatattactcccagtattgcaggggacatacaccacactgtgatcttgttcacaatattcgggggggagaggatgatattactcccaatatcaaagtaggtgtacacccccttctgatattgatcgtaatatccagaattaaagatgataacgttactcccaatattgcagggggtgtacatttttgaatactgttcataatattaagagggggaggggatgatatctgtcccaatatcgcaaagtgtgtacacctcctgtgacattgtcccaaatatccagaggaaaaaaggatgttattactcttaatatctcagagagtgtacacctccctgtgatattgtttgtaacatccagaagaaagaggctgatattactcttaatatcgcagggggtgtacacccccgccccgggatattattcgtaatatccagggggaagtggaatgttcagaatgggagaggatgatattacttgcaatatcatagtgggtgtacaccccactgtgatattgtttgtaatatccgggaaaggagaaaatgacattcctccccatatggcaggggctgtacaccacctatcatattgttcaaaatatccagaaggggagaggatatgtctccaagtatcacagggggtgtacaccccgctgtaatattcttcctaatatccagggtgtgagaggataatagtactcccaatatcccagggcatgtacaccccccttgtgatgttgttcctaaaattcatggggagaaagaatattactcccaatatcacagggggtgtacatacactctgtaatattgttgccaatatgcagcaggagagaggatgatattactcccaatatcacaggggctgtacaccccgctgggatattgtttctaatatcaagggggaaaaaggatgatattactcccaatgtcgcagggtgtgtacttcctctttgtgacattgttcctaatatccaggagagaagagggtgacattccttccaaaactgaaaggggtgtacacaccctttgagatattgtctttaatatccagaacgaaacaggatgatataactcctaatactgcaggggggtacaccctctctgtgatactgtttctaatatccaggaggggaaagaaaaatattaatcccaatatcacagggggtgtacattccccctttaatattgttcctaatatccaggaagacacaggatgatactatttccagcagcacagggcatgtacacccctttgtgatattgttcctaatatccaggaaaagagaggatgatattactgtcaatattgcagggcgtatacactggttctgtgatattgtttctaatatccgggggtggagaaaatgatattactcccaatattccagcgggtgtacacccgttctatgatattgttcctaatatctgggggagagagaatgatattattgtcaatatcacaggggatgtacagattccctgtgatattgtttctaatattcacagggggagaagggtataatactcccgatatcgcagggggtgtacactccccctgtgaagttgttcctaatatccagggattgagagaatgatattactcccaatatcacaggcggtgtaaaccccctgtgtgatattgttcctaacatccagaggaaaagatgatgatattattttcaatatcacagggggtgtacgcatccctgtgatattgtttctaatatccaggggaggagaggatgatattattgttaatatcgcagggggtgtaccccaccctgtgatactgttcctaatatccggggtggaagaggataatattgctcccaatatcgcaaagggtgtacaaccttcctgagatattggtcctaatatccagggagggagaggatgatattactttcaatatcacagggagtttacacaacccctgcgatattgttcctaatatccagcggaagaagagttaggataatactattttcaaaattgctgggtctgtaccccctccccgtgatattgtttctaatatccaggaggggagaaagtaatatgactcccaatatcttagaagatgtacaccctccccataatattatttcttacatccagggggtagaggatgattttgctttcaatatcacagagggagtaaacctttccggtgatattgtttttaatatttaaaaagagagaagataaaattactcccaatacaaaggggatgtattgtgtactcccccctctgatattcttttttaatatccagatggagagaggatgatattactttcaatattgcatgggatgtataaatcccctgtgttattgttctgaatatacaggtggggagagtatgatattactccaaatatcgcagggggttctttccccctgtgatattgttcctaacattcagggagggagaggatgatattactcttaatattgcagggggtgtacccacgcctatgatattgttcctaatatccagagggggagaggatgatctaactcagaatatgacaaggggtgtacacacagcctgtgatatggttcctaatatacaggggagaaggggataatatttctcccaatatcgcagggggtgtacaaccccctgtgatactgttcctaatatacagaaggggacagcatgatattgttcctaatatcgcaggaggtgtacaacgccctgtgatattgttcctaatatccagggcgggagaggatgatattaccctcaatatcgcagggggtgtgcactttccctgttatattgttcctatgatccgggtggggggaaatgacattagtcccaatatcgcaggatgtgtgcaccgctcccccgtgatattgttcctaatatcaagggggagagaggaggatattactcccaatatcgcaagggatgtacatcctccatgcgatattgttcgtaatattcaggaggagagaggatgatattactcttaatatcgcagaaagtggacacccaccctgtgatgttcttcataatatccagggaagcagacgattatatgactttcaatatcgctgggagtgtacatcccttttgggatattgtttctaatatccaggaagggagaggattatattactctcagtattgcaggcagtgtacaccttttttgtgatattgttcctaatattcagaaagggaaaggatgatattactcccaatattgcaggtggtgtatatccccctctgatattgttccttatatcaaggaagagaaagaataatattactcccaatatcaaagacagtgtagacccctcctgtgatattgtatttaatatccatggggaaagaggatgatgttactcccaatatcgcagggggtttacacccacactgtgatattattcctaaaatccagtggaggagaaaataatattgctcccaatattgcagggtgtatacaggccctcccccgttatattgctcctaatatccagcggtggagaggatattactttcaatttgtgtagggagtgtatacccccctgtgatatttttctaatatcaaggatgggaaaggatgacattactcccaatatcgcaggaggtgtacacgccctgtgatattgttcctaatatctagggaaggagaggatgatattactttcaatattgcaggagctgtacaccctctgtggtattgttcttaatatttaggttgggagaaaatgatatgagtccaaatatcgcagaaggcatacacacttccaataacattgttcttaatatccgggggagagggtgatattactcccaaaatctctggggggtgtacacccccttctgatatttttcctaatatccagggaaggaaacgatgatattactataaatattccaaggagtgtacaccttcctaatatcctaatattgttcctaatatccaggggtgggagaggattatattactcccgatatcgcagtgggtgtacacccctcctgtgatattgtttctaatatccaagctaggagaaaatgatatcactctcaataccacagggggtgtacaccttccgcatcatattgttcctaatattcagagggaaagaagatgaagttactttcaatatcggaggggttgtacacaacccctgtgatattgctgctagtatccaggaagaaaggggattatgttactccccttatagcagggggtatacacctcccctgtaatattgttcctaatatcaaggctgggatatacgtggggggaaggatgatattactcccaatatcgcaggggttatacaaccttctgtgatattgctcctagtaaccagggcagaagaagatgatattactcctaatatcgcaggaggtgtacactcccccattatgttgttcccaatatgcagaaaaggagaggatgacattattgccagtatcgcagggtgtgtacaccacccctgtaatattgttccaaatatttagggggagagaggatgatattactcccaacatcgcagggggtgtacacacatcccctgtaatatagttcttaaaatctaggggaaaaggggatcttatttctctaaatattgcagagggtgtacactccccggtgatattgttcctaatagccgggagggagataattaaattactttcaatatctcagagagtgtacatcgcccttgcgatattgttcctaatatccagagcaaaagagaatgatattactcccaatatcttaggagtgtacatttaacctgtaatattgttcctaatatccagggggaagagaatagtattactgccaatatcgtaggggttgtacaccttttctgtgatattgttgcaaatatttagtagagggaaagaatattactcgcaatatcacagggaatgtatacttcccctgtgatattgttctgatatccagaaaaagagagggtaatattactcccaatattgcagggggtgtacaccccccttgtgatattgatcctaatataaaggaaggaagaggatattactcctcatatagaaggggttgtccaccccccttgtgatattattcctaatattcagggaagcagaggatgatattattttcaatatcacagagggtgtgcagtccacctgtgatattgttcttaatattcggggggagaggatgttattatgcctgatatcgcagtagaggtacacccctcaagtgatactgttcctaataaccaggggtgaagaggatgatattactcccaatatcgcaggtggtgtacacccccccatgatggtttctaatatacagagggggagaggaaaatattactcccaaaatcgctggaggtctacaccccccttgtgatattgttcctaatatccaggaaaggaaacgatgatattactgtgaatattccagggggtgtacacccgctttgtaatattgttcctcatatccagggtgtggagaggattatattactcccagtatcgcagggggtgcacgacgcccctgtgatattgtttttcatatccaggaggggagattattatcaatatggcaaggggtgaacaccccctgtgatattgtacttaatagttaggttggcagaaaatgatattagtctcgatatcgcagggggtgtgcactccgcctggtgatattgcttttaatatcaagggggagaaaatggcattactcccaatatcgcagggggtgtacaccgctcatgtgatattgttcctaatatccaggtggagagaacataatattactcccaatatcgcacaaggtgtacacccctcctgtgatatggttcctaatatccatgggaggagatgatgatattactcccaatatcacaggggatgtacaccacccttgtgatattgttcctaatatccagggaagaaaacgatgatattattgtgaatattacagggagtgtacacactccctgtgatattgtttttgatatacagggtgggagaggatgatattactcccaatatcacataaggtgtacaccccccgtgatattgttctaaatatttcggtggggagaaaatgatattagtctccatatcacagggggtgtgtgctcctcaggtgatattgtttttaatatcaagagggggaggagattatattactttcattatcacagggggtgtacacccctcctgtgatattgttccttatatccaggcgaggggaaaataatattactctcaatatcgcaggaggtgtacacaccccatgtgatattgttcctaatattaagggggaaagaagataatattactttcaatatcacagggtttgtactcctttcttgtgatatagtttttagtatccagggggaaagagcatgatattactcccattgtagcaaggggtgtacacacctcctgtgatattgttcctaatatccagaagtggtgaggatgatattactcccaatatcgcagggggtatacaccccacctatgatattatttctaatatccatgggaaaagagtatgatattacacccaatgtcgcagagggtgtgtatttttcctgtgatattgtttctaatattcaggcggggagaagatgatattactctcaatatagcagaaattgtacatccccgctgtgatattcttcataataatcagggaaaaagaggatgatattactaccaatattgcaggggggttacacttcccctatggtagtgttcctaatatccaggaagaaagaggatgatattaatcccattatccaggaagtgtacacccaccctgtcatgttgttcctaatatccagcagggaagaggatgatattacaccccccccccgtgatattctccttaatatccaggaggggagaggctgatattactggatatatagcaggggtgttcataccttctgtgatattgttcctaatatccagaaaaggagaggatgatattacttccaatatcgcagaaggtgtacacctccctgtgatattgatcctgacattcagaaggggagaggatgatattactcaaaataccgcagggcatgtgcattcccttgtgatattgttcctaatacccagaagggaacaggataatattactttcaatatcgcagggagtgcacacccccctttggtatggttcttaatatccagaaggaaagagggtgctattactttccatattgcaaggggtgtacaccccactgtggtatggttcataatatccaggcagggagagggtgctattactccccacagtgcggggcatgtacaccctgctgcggtacggttcctaatatccagggggagagaggatgctatgactccctatatcgcggggtgtgtacacccctgtgtggtatgttttgtattctccaggaacggagagggtgttgttacccctcatatcgctggaaatgtacactcccctgtggtatggttcgtaatatccaggggattgagggtactgttacccccatactccccatatcgtggggggagtgcacctccctgtggtatggttcgaaatatccagggtaagagagggtgctattattccccattttgcaggaggcgtacacccccctatggtatggttcgtaatatccggggtgaggggatgctatcaaaagaagagagaaagagaccccccatattgttctatattattttatactcagtacctgttttaagaagaaacaaggaagtgaaaccaaaagcaggcagcccggcgccaggcaccagacccaaaaccagacccgaaaccaggcctgggcctgcctgaccttagcctgatagttaaaattcaacccatgacctagcaaccaatgttatccatagattccagacattgtatggaaggacattgtgaaatttcttgttctgtgctgtttcactctgattaccggtgcctgcagcccctgtcacatacccactagattgctcaatcaatcatggccctttcatgtaagatctttagtgttgtgagcccttaaaaaggacagaaattgtgcactcaacaagctcggattttgagacgctagtctttcgatgcttccagctgattaaaagccacttccttcactacctcggtgtctgtggggttttgtccgcgactcctcctgctacactatgactccccatatcaaggggggtgtacacccccctgtggttcgtaatatccagcaggggaaaaggtgctattactccccatattgcagggagtgtacacccccttgtagtatggatcgtaaaatcaaggggggagggaaggtgtaattatccccatatctcagggggtgtacacccctttgtggtaaagtttgtaatatccagggatattacagggatattatccccaaattaatacttttataatttcttatgcctgcctttactgcaatctctgaacataaattgtgaagatttcatggacatttatcacttccccaatcaatacttttataatttcctatgcctgtctttactttaatctcttaatctcatcatctttgtgagctgaggatgtatgtcgcctcaggaccctgtgatgattgcattaactccacaaattgtttataaaacatgtgtatttgaacaatatgaaatctgggcaccctgaaaaagaacaggataagagcgatgttcagcgaacaagggagataagcataaggtctgactgcctgtggggctgggcagaacagagtcacatttttcttattgcagaaaatgagtaggagaaatatcactgggaagggaacgcattcctaggggaggcctatggacggccgctctgggggtgtatcccttatgtggttgaagataagggatgaaatacaccctggtcccctgcagtgccctcaggcttgctaggattagaaattccagcctggcgaattctagtcagaccagttctctgctcttgaaccccgtttcctgttaagatgtttatcaatgacaatgcgtgcacagcaggacatggaacctcaatagtaattccattttctccctggccttgtgaccttgctaggcccttctgcccttgtgatcttttattgccatttgaagcatgtgatctctgtgacccactccctattcgtatccccctccccttttgaagtccctaataaaaacttgctggttttgcagatcaggtggtcatcacagaacctgccgatatgtgatgtcaccccggaggctcagctgtaaaatttctctttcgtactctttcactttatttctcagaccaggtgacacttaaggaaaatagaaaagaacctactttgaaatattgggggctagttcccccaatagacattgttcctaatatccagaaaaaaagaagatgatattactcccaatatcacaggggttgtgaaccccacctgtgatatggttcctaatatccaggaagggagagaatgatattactctccatattgcagggggtgtgcacatccctgtgatattgttcctaatatccaggggaggagagggtgatattactcccaatattgcaagggttgtaaactccaccctgtaatattgctcctaatatttaggatttagggggggagaggataatattactcccaatatcgcaggggatgtatatgccctctttgatattgttcctaatatccagggggggagaggataatattactttccatatcacaaagagtgttcacccccctgtgatattgttcctaatatccaaaaaggaagaggatgatatcaatcccaatatcacaggaagtgtacaccccccccttttatattgtttctaatatccaggggaaatgagggtgatatttctctcaatatagcagaatgggtacactccccctgggatattattcctaatatccaggggaaaaaaagaggttgatattcttcccagtatagcagggaatgaatacaccctttgtgatattgcttctaatatcaaggggaaaagaggatgatatgactcccaatatcacaggggatgtaaacctgtggcgttgttgctaatatcaaggagggaagagtatgatattactcctaatgtcgccgaaggtgcacactttccctgtgatattgttcctaatatccaaaagggaagagaatgatattacccccagtattgcagggtgtacaccacccctgtgatattgctcctaatacccaggaaaaaagagaatgctattacccccaatatctaaggggacgtataccttccctgtgatattgtttctaatatccaagtggggagaggatggttttactctcaatattgcagggagtgtacactccccctgtgatactgtttctaatactcgggctgggagaaatagtattactcccaatatcgcagtgatattgtttccctgtgatattgtttctaatatctagtgggggagataattatattactaccccatacacaggggagggtgtacattcccctgtgatattgtttgtaatatccagggaaggagaggatgttactcccaatatcacaggggttgtacaccccttttttgatattgttcctaatatctggggggcagagaattatattactgtcaatatcacagagtgtgtacaccccctctgttatattactctttatattcagggcggtagaggatgatattactccctatatcacagggggtgttcacccctcctgtgatattgtttataatatctaaggggaaagaggatgatatcactctcaatatcaaaggaaatgtacacctttcctgtgatattgtttttattatataggggggcagaggatgatattaagaacaataccacaggggatgtacacccacgtattgatattgtccctaatatgtatggggaaagaggacagtgtaactcccgatatcgcagagtgtgtacacccccttgtgatattgtttctgatatacacggggagaaaagataatatttcttccaaaattgcagggggtgtacaaccccctgtgatattgtttttaatatccagtgggggagagaatattactcccaatattgcagggcgtgtacacaacccctgtgatattgttcctaatatccagagtaggggaggatgacattactttcaatatcgcaaggggtgtacattcccctgtgatattgctcctaatatccatgaggggagaggatgatattattcctaatatggcaggggctgtacaccttccctgtgatattgtttctaacatccagtgggggagaaaatgatattactccctatatcacagaaggtgtacactttccctgtgatattgttcctaatatccagaaggggagaggataatattactcccaatatcgcaggaagcttacaactcccctgtgatattgtttctaatatccagggaggtagggatgatattactcccaatatcgcaggggatgtacactcccccgtgacattgtttctaataaccagggggtgagaggatgatattacgcttaataccgaagggggtgtacacacccttgtgatattgtgcctaatagccagggggaagaaaattatattaattttaatatttatggggaaaaaggatgatattactcccaatatcacaggggctgtacaccgaccttttgatattgtttttaatatccagaagagaagaggataatattgctcccaatatcagaaaaggtgtaaaccccttctgtgatattggtcctaatatccagggagggagagaataatattactaccaatatcacagaaggtgcccacccccaaggtgatattgctcctaatatccaaagataatagggtgatgttactcccaatatcacaggaggtgttcacaccccttgtgatattgtttctaacgtacagggaagggagaggatgatattattcccaatatcacaggaggtgtatactcctctgtgatattgattttaatattcggggggaaaggatgatattactccctatatcgcagagggtgtacaccctctgtaatattgatcctaatatccagggcgggataggatgatattactcccaatatcgcagaaagtctacacaacccccagtaatattgtttttactatccagggggaagaggatgacattactcccaatttcacagagtgtgtacactcaccatttgatattgtttctaatatctagggggagagaatatattactcccaatatcacaggaattgtacaccacctctgtgacattcttgtgaatatccggggaaaaagagaataatattactcccaatattgcagagcgtgtacacccctccatgatatcgatactaatatttttttaaagaggatgatattactcccattgtcacaggatgtgtacaccccccttgtgaaattgttcataatattctggggggagagcataatattactccccatatcgaaaaaggtgtccaccctccttataatatggttcctaatatccaggatattacttaatccaggatacttgtaataccctaaatatacaattgcttgaacctccacctcccaggttcaagcaattcttctgcctcagcctcccgagtagctgggactacaggggcacaccaccacacccagctaatttttttttcttgtatttttagtagagatggggttttgccatattggccaggctggtctcaaactcctgaccttgtgatctgcccacctcagcctcccaaagtgctgggattataggcgtgacccaccgtgccaagccaggaagaggatgctctatagatttccccaataagagatggctttgcagggccattccaaaatatgtcaaagaaatacatttggggataaaatactttgatttcctttagggaatgttatctattatgtgatgctataccagagtcaggttggagtcggttatcttattgcaacaaagagtctgttccgtcactgttgggatctctattttttcctcttatttcttgagacagggtctcactctgtcacccagtctggagtgcagtggtgcgatcttcattcactgaaacctctgcctcctgtgttcaggtgattctcgtgcctcagccccttaagtaactaggattacaggtgtgcgccaccacacccagctaatttttgtattttcagtagagatggtattttgccctgttggccaggctggtcttgaactcctggcctcgtgtcatctgcccacctcgacctcccaaagtgctgggactgcaaatgtgagctattgtgcccagccaggatctctgttttaatgttagtgctggtcactttgcatgaactccaaagggaagaaatataatgaggtgtgtctgaccccctgccttctcatcgtgacctgaattagtttttcaggtttgcaggggatacccttggacaagaaggggctctattcggttggttggggggattagaattttactttttgtttacaatatttctcctgaaagagttaggggctcacaaggaatttccgcgtgagcaacttatgaggaaagccatctgggaagatatgtgtccttgtgtcactgggatattctcgtttaccccaatgatacggcaatgacgcagggttgtgaaattacagctatgtgtttggggaaaaaagaaagcaggattgtgtgactacgtttccaaacttcacttgcccttagccatagtgagttgggggcctggagattctgttttctttcacaatgatatagatacaattaaatgtatagaaagcaaaaaaataaaaaggtgagtaatgaggaacctctgattcctgagtggccatgtagttacccatggcacagagccacagttactgaaggtaaagtttgctggggaatttagaaatgaatccagctcttggaggagtcagtttactggatgcctaagaaaatgcaaacaaaataagaaaaaagggtaatattcaatcccatagttattgttacctgtcatagctaaagtaaaattaaaacagagtgctggcttcaatcttgatgctacactaagcttagatttcagtgaatgtgagtctcagccactagctcagagccacctcccaaagaccaaatcatgtagggacaatagaaagtacttctgagaattgtggttaccaagaacctagtaactgttggggaggagcaaaacaaagtacagaaaccagagggtacaatctgagtgagactgctatcagcttctggaggagcctttactaaaatgaatgatgagagtaactggatgatgagagtaactaatggatgatgagagtaagcaatgtctttggttttcttttttttttttttttttttttagcagacgtctcactcttgtcgcccaggctggagtgtaatggcatgatctcgcctcactgcaacctccacctcctgggttcaagcaattctcctgtctcagcctcccgagtagctgggactacaggcactcatcaccacacctggctaatttttgtatttttagtattttctggtgagggtccaggtttccggaaacaactcagagacatatgttaagatgttatctttagttttcacagggaaccaaatatgttacgactccaatttccttggctattgttttaagttaccattaccttctcgttgatcaagttgctcatttacttctcaagcctagctagatgcctggaatttcccttgaaggaagtcaagattttcctttatctccatactggctgatggtgatcgagtaagcccctaagaggggtccctgctccatctcgagatgctgctagattctacagtgcctaataaacagctctcgcctggccgacaaagagctgcttgctctctggatagcaattccaaagtgaacagacaacatcctgtttggaagactgccactctgttagaagaagcatcaggaaaacctttcttttgagctatttataactaacagcaattgaccaagtatacttttgtgagtgaaactgacctttctccctgtaagaattctccaaaatttggaaactatttgtgagtatttttacttatggcaatataattattggcacaagctcaatcagattcggttttctttcgtaacaggaaccattggagatactcattactctttgaaggcttacagtggaatgaattcaaatacgacttatttgaggaattgaagttgactttatggagctgataagaatcttcttggagaaaaaaagactgggtatattttcaatatgctttccttttaaggtccctcacctgtggaaagtaaagaatgtcactttctgacaggctcaggaacctcaagttatgtagggatctcaagaagatgggggaattcacccagttcatacaggtgaaattgctgttgcaaagattatgaatatgagagaagtccagcatggctgacttcatctcgtgtctggcctcaggctggctgcccttgctcactcttgggcataggccaagctagccatgggaggaatttagtttatagtttaactttgaagcacggatgataatagtctctccctaaaatgaaccccttccttgctcagggactgaaactacctttgtatgacaaatgaaagcccacaagattaagattatgagaggggcctgaattctgctaaaatgcaggtgtagctgactgataacaagtcattgtcccacagcttgcctttctataatctcttgcttctcaggagtcacatggccagaggtcctgagatttccagtcctgtgacccccacccagagatggacttagtgcatgaggaccattttccacacccctatgatttcatcctcaaacaatcagcagcaaccattccctagccccctgccttccaaattatccataaaaatcctagcctctgagttattagggagattgattaataatcccagtcctaccccttgggttgctctgatttaattaaaccttctctactgcaataccacggactcagtaaattggttttgtctgtgcaatgggcaagaagaacatgttgcatggttatacaggtactacaagcacagtctgatggcaaattattggttttgcttcctgcccttgatgtttctaaacatctagtccaaaattacttgtgaaaggtccagcaaagccaattttaaaagaggctatatggccaatcactattctttctacacattattgcaaataatcaggccacggctgggcacggtggctcatgcctgcaatcccagcactttgggaggctgaggcaggatcacctgaaatcaggagttcaagaccagcctaggcaacatgataaaaccctgtctctactaaaaatacaaaattagccaggcatggtggcatgcacctgtaatcccagctacttgggagactgagggaggagaatcacttgaacctgggaggcagagattgcagtgagctgagatcacaccactgcactccagcctgggcaatagagtgagactttgtctcaaataataataataataatcagaccaagtataatgaaattaaaatttattttgcaaataaattggtcctactacaatttatccttcatagaaatgtggaaactgaagataaaaaaaattaggtttcagaagaaaactatactacacctgttattagattctagccctaaacattgtttttgaggtttttattatttacctgcaatttggtctaaattctgaattatttcctgactacaagtatccaaggaataaatgggttttctttttctttatgatagttttagttggcttctaatgcaacaacaatttttattgtaatcctgtgtgcattctattcctactattcaaattattaatgttatagatctttcattgtagtacttctgaattaaccaaaatcacagtattctgaagatgattctacaaagcctgctgtttctacaaaggctgctgatgatttctacaaagcctgctgtagtgttgctgtggcctctgcttaaaaaagtagaaaacacattgatgcagcatgttcaccccaacctccctgcctaaaggctcagggaccatcttggaagaggaaggcgcgtgagattgtaagagccgaattagggggatggagtgtggagaataaggacacttcatcttggatgctcacctgccaaattgacttctgatgaaagccagctccagaaatgtgcctacagttactactttcacctaaaccctgcccttagtcaaatccttctcttcttctaagcaatcaacttcaattccttgtataacccacagtataaaagggcttttataccattctatcctattgcatgtaagccttgggtctgggaggtaacagtgtgggattccaccatctcatctccctgccacccaaacatgcctgctcttctttaagcaatattaaatgtttgtacttcagaaatttgatttgtcagcctcttcttcagactctcagcttctttggcctttgggagtaaatttgcataggcctgctcaaaacaggatgttctgggggtttgggggtgttgttttgttttgttttttgttttgtttagagacagggtctcactctgtcacccaggttggagtgcagtggtgcaatcatggcacactgcagcctcaaactcctaggctcaagcaatccccccaccttggcctcccaaagttctgggattacaagcataagccaccatgcccagccctggacttttctttaaagacatttacacagtgtaggaattactgtgggtgcactgctcaggtccccttctccaggatgctcattcctacctcatagatgattttcctgcagagatttgacctcagctgaagggcagtcacctggtccaggtggttgctattcacctccttcctgagaacagccaacagccagggacacgctagcacagagatataagagcgaccaaggtgaggccccttctgtgctgcggtgcatgctccagagcctccctgggatcagacttaagagggtctccagccagatctggtcttcgctgctttcctcgagctccccagcgcactcctgcaatgcatcttttttttttttttttttttttttgagacggagtttcactcttgttgcccaggctggaatgcaatggcgcaatctcagctcaccacaacctctgcctcgcgggttcaagtgattctccttcctcagcctcccaagtacctgggattacaggcatgcaccaccacgcccagctaattttgtatttttagtagaaacgggtttctccatgttggtcaggctggtttcgaactcctgacctcagttgatcctcctgcctcagccttccaaagtgctgggattacaggtgtgagccactgtgcctggcccaatgcacctcttgaatcacctcctcatgctttgcttttagagaacatgatccccaacatgtgattccagcaaagattctagaaagccaaccgtgacaatcacttctgggtttagatgacccccccccaccacaagatggcagtgagcacctcatcacagaggtgctgatggtctgcagcaccgcgccaggccagaacgtgccttttacagaagaaaataacccagtagctgactaggatggtgaggagggctggtgagcactgcggtagtgagagggacactagcatcactgagatgcaagtgatggtcatttttcataggtcaaagctcaaagcaggggacagttacagggcagggcttcatagcaccagtgtgatgaaagtatctgggagtggctaaggccagcactatgccatgggaagcaaggtgggcctgaggaggaggcagcagcgtcagcctgcaacaagtgggggctgccctgcagagacctaagagtcatgttatagagcacagtgtctgtaaggccaagaagtgtggacagccaagtgtgtcaattactagacatactcaagaggagcaggaagggcagggcatggtggctcatgcctgtaatcccagctacttgggagactgaggaaggagaatcgcttgaacccgggaggtgaaaattgcaatgagccgagatttcgccactgcactccagcctgtgtgatgggagcgggactccatctcaaaacaaaaaaagaaaaaggaaaaagaaaaaaagaaaaacctaggtatacttctcaagcaaataaaaataatcaaaaccaatatcatgcccgggcacaaatttcatatatataacagatttaaatatatgagggtgattatcctctcatatctccatttttttttgtttttccatttttttctttactaaaaaaagttaatgccaatgacacacaatttttttttttttttttttttttgagatggagtctcacttcttcgccctggctggagtgcaatggcgtgatctcgactcactgcaaagtctgcctcctgggttcaagcaattctcctgcctcagcctcccaagtagctgggaccacaggagtgagccaccacacccagctaatttttgtatttttaatagagacggggtttcaccatattggccaggctggtctcaaactcctgatctcaaataatctgcccgcctcggcctcccaagattctgggattataggcgttgagccactgcgccccgcctatgtatgattttttttttaattttattttcataagtttttggggaacaggtggtattttgttacatgagtaatttctttagttgtgatttgtgagattttggttcacccatcaactgagaagtatacactgaacccaatttgtggtcttttatccctcacccccttcccaccctttcccccggagtccctgaagtccattgtatcattcttatgcctttgcatcttcatagcttagctcttgaacccttactttctgtttgagggagaagacatatcatctacaagtagatactgtgtaaacattccattgcatgactatcccataacttatttattatttgtgtttggttatttgctgctatgtaacaaccccactcccaactaaatggtgtgacaattccatgattctgtggatcaaaaattctgaaaagtcaaacccaaggagttttgtctctgctccatgatgctaaagcctccgcaggggtgaggcgaatggctcagggtgactgaaaagctcagggttggaacagctggggatgaggcctctatgtataagatgattcttcactcacaggtctgaaactatggtggggacagccagaaggctcggctcagctgggacagtcacctgagccctacacatgacctctccaacatggtgatcctgaagcagttgggtttcttacacagcatcacacttttcttttttttttttttttttgagatgaaatattgctctatcacccaggctggagtgcagtggcacgatctcagctcactgcagcctccgcctaccaggttcaagcgattctcctgctccagcctcccaagttgctgggattgcaggcgcctgccaccaagcccagctaatttttgtatttttagtagagacggggtttcaccttgttggccaggctagtcttgacctcttgacctcaggcgatccgcctgcctcggcctcccaaagtgctgggattacaggcatgagccaccgcgcccggccaaagctcacacttcttatgattcagccttagatgtcacatcagttcattttccccacacttattagtgttagaagtcacaagcccacccatactcaggggactggcacacagaccccactctcaatggaaggggtgggacaccaccattcctgctgatgggcatttgggtaacttcctgtttgaagctattaagattgggctgctgtggccgggcgcagtggctcacgcctctaatcccagcactttgggaggccgaggcgggcggatcacgaagtcaggagatcgagaccatcctggctaacacggtgaaaccccgtctttactaaaaataccaaaaaaaaaaaaaattagctgggcatggtagcgggcgcctgtagtcccagctactcgggaggctgaggcaggagaacggcgtgaacccgggaggcggagcttgcagtgagccgagattgtgccactgcactccagcctaggcgacagagcaagactccgtctccaaaaaaaaaaaaaaagattgggctgctgtgactattctagtaggtgtctttggtgagcgcctacacgtgtttctctttttctctttagtatatgcccaggaggggaactgctggctcccagataccgtatgttcagggtcacacacacttccacagggttttccaaagcccttgtaccagcacgcactcccagcacctgtgtgactgctccagctgtcccacagtctcatcagttctattgctgatattttcattttagcttaagttatatttaataggaaaattaccgttgcctctgccccccgttcctgcctgtaggagtttctcgtagctgttgctacaggtggccacaaatctgtcacttaaacccacacaaattgatgtccttatggctttggagtcagaagtgtcaactgaaggtactagcagggctgtactgacctggtggcctcagggagcatctgtgctgcttctccaccttctagaggctgctgcatccctcgctccagccccttcctgacaccactcaccctcctacttctgttatcacatcctcaccttctctgtgttcagggctccctctgtctctctcttgcaagcacacttgggattccattgagggccacccacataacccaggagaatttctccacctcaatatccttaacaactgcagagcccttttgccataaaagttaccattcacgggttccagggattgtgacatgggtagctttaggagtgattattcctgcctgtctcccgctcaccagaacttggactttctctctcaacaggagccccctgtgtgggaatagcctgtctcaacgacgccctctataaggacctgcttcctcaaaggacctcatagtcgggtcctgcccctcagtgtccagtctgccttggctggaggggctgcaggggtgtgttggcgccacctggtggagacagggcatcacagcaggtgggagcccagtagaagcacaaccaaaacatgggtaatgtttaaaattttctggctaagcgctgtggctcacgcctgtaattccagcactttgggaggccgaggtgggtggatcacatgaggacgggagtttgagaccagcctggccaacatggtgaaacatcccctctactaaaaaatacagaaaaattagctggacatgtggcgcgctcctgtaatcccagctactcgagaggctgagacacgagaatcgcttcaaccccggaggggttgccgagatcgcgccactgcactccaggctgggcgatagagcgagactctgtctcaaaaaaaaaaaaagaagaggggaggcgaggggaggggaggggaaaagggggaatttgtttggagctgagacatccatcttctcctgacctcagatatttgcactcctggttatgaagccttcacacttggactgaatacaccaccagctttcccgatttccagcgtgcaaatggcagatcgtgagacttctcagcttccataattacatgagccaatttatatatataaattgggtcctccagaaaaacagaataaattatatatataattatacgcataacttaattaaattatacgtataacttagctatatatataatttattctgtttttctgaagaaccctactgacacaaatgttgagcatcttttcatgtgcttattggcttaataacttgtacatcttctttggggaaatgtctattcaagttctttgcccattttgtaactgaactattaatatttgtctttacattgttgagttgtaaaagttccttatatattctagatactagagccttatcagatatatttctgcaactattttctcctaatatataggttgtgtttttattttctttttctttttttttttattgagacagtctcactctgtcacccaggctggagtgcagtggcatgatcttggctcactgcagactcgacctgccaggctcaagcaattctcccacttcagcctcctgagtagctgaggttataggcacttgccatcgcacccagctaatttttgtattttttagtagagccgaggtttcgccatgttgcctaggttggtcttgaactccctgcctcaaagcgatctgtcagcctcagtctccctaagtgctggaagtacaggtgtgagccacagtgcccggccatctattttcaatagtgttttttgatgtacacaggtttggaattttgataatgttcaattcatccatttttttttttttttttttggttctttctactggaccaccactcttgagccctctaatccaacctccacgcggcagccagagggagctctctaaatgtaattactctttccctgctccacctgctcaaaacagtgtcacatttgtgatttaaaacagtatttctcaaacctaatttgcaaacaaagcaggtggaactcttcttgtatgcacagcatctgatttggttggtctggcatgggtctgggagtgagcacacctaccaagcggctgctggggtaacttgcgttttccactgatgatttcagcaatgtttccggtcccacatgctcctccagaaccttgtactcccccatgaaaaggtggagtccatttccccttcctttatttatttttttgagacgaagtttcactcttgttgcccaggctggagcgcaatggcgtgatctcagctcaccgcaacctccgcctcctgggttcaagcaatgcttctacctcagcctcccgagtagctgggattacaggtatgtgccaccacgcccagctaattttgtatttttagtagagacggggtttctccatgtcggccaggctggtctcaaactcccgacctcaggtgatccgcccgcctcagcctcccaaagtgctgggattacaggcgggagccaccgcgcccggctatttccccttcctttgaacctgatcaggacttgacgatggcatcaacatggtgagagtgaccctgcatggcttatgaggctgggttacacaaggcgatgttgcttctgactggctccctctcaggatacatgcccttggaacccatcctctaagctccttgggagcccaacttagcccatgtggagacaagacagggagagaaacagaggcacccccagccctcagccagcatcaaccgccagacaggagagcaaatgcgccaacaatgattccagctgaagcctcagacagcgtggagcagagatgagggatccctgcagattgcagatgcgtgagcaaaatgcatgctgtcactgttttgaaacaacaatgtctgggggctgtttgttatgcagcaatagacagctgtaacaatgctgttactgctgtattccatgaatgactgcactttgagtagcagggggctagatcactagataagccccatggcttctgtgtatgctatttttctacttttatatccttttcattcactttttttttttttttttttgagacagagtctcactctgttgcccaggtgggagtgcagtggtgcaatcttggcggactgcaacctccacttcccgggttcaagcaattattgtgcctcagcctcctgagtagctgcgactatagatgcacccccatgcctggctagtttccgtatttttagtagagacggggttttgccatgttggccaggctgatctcagactcctgacctcaggtgatccacccaccttggcctcccaaagtgctgggattacaggcgtgaaccactgcacccagcctcattcactttctttacttggctcatttttccttgttgcctcaattctcctctaagatcactttcctgacatttcagcctgggcctgttgccttctctgggtcccctccgcctcctgtgcctcccccatctcagccttgatccctcagattatacttcctctgtccccaccctgaccatcttggctgtccctggatagggatgggtatcttctcccactggtctgggagatctggaaggacaggcctggaaaagacttggtcactgctggaaggagctcagttagtgtggtgctgaggacagtacgggtgaggctggccccttcacccaaactcccactctcttccatagatttcacctctgtggcccaggccataggattagggcaactccccttaaacatcgagtccatcctccaagctgtccttttttttttttttttttttttttttgagacagagtctcgctctgttgcccaggctggagtgcagtggcgcgatctcggctcactgcaagctccacctccagggttcactccattctcctgcctcagcctcccgagtagctgggactacaggagcctgccaccacacccggctaattttttgtatttttagttgagacggggtttcaccgtgttagtcaggatggtctcgatctcctgacctcgtgatccgcccgcctcggcctcccaaagtgctgggattacaggcgtgagccatcgcgcccggcctcatgctgttcttgaatagtgagcacctgttacaagtcgccccaccagcctctcacttgtacccccctcatctctttctccccaagagacagaggaccctggcacttgtgaagcatgacccagaccctggggccatggcatccaacatcctcattccccatgacccctactgtctagatgtagctgccaagagacccccagactccccgggcctctgtctagagtgccaagacagagagagaatgccctgccgcttgcatgctttgtggggtgtccttcccccttccctggctgctaggcgtgacttcaacgttctccccaacccccaaacagcagcactgacaccagctgcagacctggctcaggttagctaatgaggaccaggctggggatggagcctgaacccctaaaccccagtcctgtaccccaccctaatcctggggtctccactggacaaaacgaagcagcttggtttttcgttgttattgtttttgagatagagtatctctctgtctcccaggttggagtgcagtggcgtgatctcagctcactgcagcctccgcctcccgggttcaagtgattcttgtgccgcagcctccccagtagctgggattacaggcgcgtgccaccacacccagctaatttttgtatttttagtagagacagggtttcaccatgttggccaggctggtctgaaactcctgacctcaagtgatttcccagcctcggcctcccaaagtggaagcggcttatttttaaggagaaaactcccgtggaaaggaatcagcacctcctctgtcaacatttcacttctctgaaaagactctcacttccaacagaaagtgctttgtaacacaacaatgaggctgggcgaggtggctcatgcctgtaatcccagcactttgggaagctgaggcgagtggatcacgaggtcagaagttcgagaccagcctgaccaatatggtgaaaccccgtctctactaaaaatacaaaaattagttccgtgtggtggcgtgagcctgtaatcccagctactcaggaggctgaggcaggagaatggcttgaacccaggagatggaggttgcaatgagccgagatcacgccactgcactccagcctgggcaacagagtgagactccgtctcaaaaaaaaaaaaaaaagaatgagaacatatggacacagggaggggaacaatacacacaaacaaaatttagaaacaggtgaaaataattttagtaatatttttactaatactgatatgctcaaaatattattatttcaataagtaatctaaaaattattgagatgtcttatgttcttttcatcatactaagcctttaatatttggtgtgtattttacactcacagcacatctcaatttgcagtccccatgtttcaagcactaaataaccatgtgtgtccggtggctaccatactggacagcgttgatctgaaatcgcatctgtatgcatcaccagcatatttgcagagatccccatctcagcagcacacctgaggctcatctgcgaaagcacctgcaacttctctacaacctcccacatcacctccaaacacatcctcatgtcatctgcaaacacacccatagctcacaggccaatgcctaaatatcattgcaggcaccttcagagaaagcacttactaaaggggtatacttgattccacatctgctttgacctgcaaatctcccttctcctttacatacatttgcatctcatttgtatgtcaatctaaatccactggcagagcctcagatcatcatctcaaagtcaggtggatgtggggctgggcaggcctccaggtgttcctcctcctgcttcctctggggctcttgatcctcctcctcttccttgctgctctcctcctcctcctccaatatggtgaccagttcctcccgcagcgcccccatctccagccccaggctgcacagctgtcccagcagctggacatccactcggcgcaggttcccctgccagtaggaaggggacgtcacagggatgccaccccagagagcaaggggtctctccaggacctgggtgagagcaggtcccaactcatgtcctggccacagcgcctgggcagggtcctcactgtgcccatggaccctaactgccttcctgcttctcagagtgtctcttgatctctaactcttctctttgtctctccatttcattgtccctgacttctctctctctgtctcctccctctcttatctatatctgtccctgtttccctttgtctctgtccccatttattttttgtctttccatgcccctgtctctctgtctttatgtgttgccatttctctgcccctgcctttggctctctttctctcgcttgccctctctctgccctccccaactttctcaaattcagtctgtctctccatctctgttcctgctctccgtctctgcttcccacctctgtccctctcttttgggatctccctgtccccacctctgttcccgtccctcactctatgtctgtctctcggtgtctgtacatgcctctcatgtctctgcttctatctctcagattctgtttttcgatctctggccttctctatttttgttcatttccattcattctcatttcctctctttctctttcccttccaaacccctcactcaccagctcctccctgatccacagcagactatcgcaggcacctccagtgtctgcccctgcagtcctgagggtctgaccagggatttccactggggagacctccctcagggcctgggggggtgggcccagccccggaggcaccagtccagcctgattcagctgcctccacagttccatcgtctctgagctatggctgcaaggagcaggaagtagcaaggtccagggtggcctggtcccctggggagctgtgtgcgtggtggagagtaaagggcagagggagtgggatgggggttcctgggaaaggtatcccaaagtccactcttcagagagaatcagctggccttgtgcttttctttttccttctgaagtctaacctcaactctgctcacagggttcaaacatagcctcttgcagaggtctaactccacccttccctgcctgtctcaggcctgacccctcaggggcgctcagtgtctgtagatgcctggcaccctctgtccttccacctgccccccaccaccacttctccagcctctcctcagcctccatttgacctctggcttgcccatagcttggtccttgcttgtcctcttggcacgggtcatcctagggctttcccaccagtgtgcctttgggggcaggaatggctcccaggggcaccaagacagcaatcccttagctggagtgcctgtgtccaggctgctggcctagggccaagcagccaattctgctgaccctggacttgcctatgggtatattatccctgttgagggtgagggcttctgctgtggaaaagtctgggaagcactgcaggcctctctcggccttggacccttccttcagacccaaggtgcatatatatacatatatataatggtagatcacgaggtcaggagatcaagaccatcctggccacatggtgaaaccccgtctctagtaaaacacaaaaaattagccgggcatgctgccgcgtgcctgtagtcccagctactcgggaggctgaggcaggagaatggtgtgaacccaggaggtggaggttgcagtaagccaagatcacgccactgcattccagcctggcgacagagcaagactccatcttaaaataaacaaatgaacaatatatatatatatgtattttgttttttgagacagagtctcgctctgtcatccaggctggactgcagtggtgcaatcttggctcactgcaacctccgcctcccgggttcaagcgattcccctgcctcagcctcctgaacagctggggttacaggtgcacgccaccacacctggcgaatttttgtatgtttagtggagacggggtttcaccatgttagccaggctggtctcaaacccctgacctcaggtgatctgcccacctcggcctcccaaagtgctgggattacaggcgtgagccaacgcgcccagccccaagtcccttttaccatagaaagtaacatagtcacagtgcccagggattcacaggtatggggagagggttcgttattcagctgccacacccaccttcctaaacctgctgcccttccagtttcctcacgtgcacagccacgcccgtctgcttttagtttctcaatctgttggcttaaccttcaaaacaggcccaggatttgagcacttctcaccattccctctgccccatccccattcatctcttgcctagactgctacagcagcctcttttactggtcccctgcatccacccttgccctctaaggcaagggtccccagtccctgggccaaggaccagtaccagcccctcgcctgctaggaactgggccgcacagcaagagatgagcagcgggtaagtgagcattaccgcctgagctccgcctcctgtcacatcagcagtggcattagattctcataggaggcaaaccctattgtgaactgtgcgtgcgggggatctaggttgcctgctccttatgagaatctaatgcctgatgatctcaggtggaacagtttcatcccaaaaccatccccaccccacccccgacccccagtctatggaaaaattgtcctccacgaaaccagtccctggtaacaaaacggttagggaccgctgctctaaggtacattctccacctggcagaaataatctttacaaaatgtaaatccgattttgacactcccttcttcccactgtgaatagaataaaaccctaccaggcctgcaccgtcagcccctgcccacctctcaacccagtctcctatctctgtctgcaagctggttcccacctcaaggcctctctgctctagaggctacctctccctgcagcgcttttcccctagatctttgaatggctctttccttatcattcacttctacttcaatgtcacctcttcagagaggcctttgctgatggccctacacccagtcacttttttttatctgcttctcatcaaaattgccttgctgattcctttgtttcttattcatcctctcccacatccatcctctcccagcccagaatgttgacttcctgagagagggactgggtctgtcctgctcaccatggtaacctcggcatctagaacagtgcctgccatcacgtggtaggtgctcagtaaatattcttggaactaatgaatgaataattctatccacaagacttcacaatggctcttcatgctgcgatctagctttcaactccaaactggtcttgagatctcacctcagtctctaaccttgacatctaacctcttcacccactctcttacctgaccctaatttttaaaaatgacgtggtcagcttttcagccccctcattccctgtttttaggaggtagtgagtggaagctggaagaataagaaagcttggggagactgcaattgcagtcaggaaagaaaggtactctgccgggaagaacaccccatcttctcctagggaaagattgtggagtcctggggtttgttttgtttttcaattttttgttttaagagacagcgtctcgctctgtcacccaggctggagtgcagtggcgcaatcacagctcactgcaacttcgacctccccggctcaagtgatccccccgcctcagcctcgtgagtagctgggaccacaggcgtgcaccaccacgcccggctaacattttattttttgtggatataaggttgccctatttctttgtggagataaaggctcccctatgttgcccaggctggtctcgaactcctggcttcaagcgatgctttcgcctcggcctccacaaagtgctgggttcacaggtgcgtgagcccgacctgtgtctcgttttgaagctcagggagagggcgctgtgagcaatccctaaaccctttaagagtaaaaagtgcgtgcacctttaagaggacggttagaaaacgcggggcgtggccacaggagaataagttcgcgctgaaccaggagcgtgggataagaccggccccttccggttacgaaaccttagcaagatggcggctccctgggcgtccctgcgcctggtcgcccccatgtggaatgggcgtatcaggggcatccatcgcctgggtgcggcagtggccccagagggcaatcagaagaagaaaaggacaatactccagttcctgaccaactatttctacgatgtggaggctctgagggattacttgctccaaagggagatgtacaaggtgcatgagaaaaatcggtttcgagacaaggagtggatcaggccagataagtatggccatttctctcaggagttctggaatttctgtgaagtgcctgtcgaagctgtggatgccggtgactgtgacatcaactacgagggcctggataacctcctccgcctgaaggagctccagtccttgtcgctgcagcgctgctgccacgtggacgactggtgtctcagccgcctctacccactggccgactcgttgcaggagctctcgctggccggttgcccccgcatctccgaacggggcctcgcctgcctccaccacctccagaacctccgcaggctggacatctcggacctccctgccgtgtccaaccctggcctcactcagatattggtggaggagatgctgcccaattgcgaggttgtgggagtcgactgggctgagggcctgaagtcagggccggaggagcagcctcgggacacagccagccctgtccctgcctagcctttagccctgtccccactcacgtggcttctcagcgggctgcatggaatgtctggtagctcaccacacttctggcttccatttgtcttcactcaacgtcagggtgggggagtggtgctggccaatcacaggagagagcgtgagttcccagtatttattcctggctgcccttggctaaaggtcacagctcctgtcaccctgtcaggcagccctttccatgcccctgttcaggcctggggaggtaaaggctcaggctgttagtagccgcagagagccacactcaccttgtcaggagactcttctcaaactgtccttatgtgagtgcactgccatttcttgcagggaccctgactgacacaggggctactactgacactttacagggatggttctcccccgtgcagggccgctgtgcccactgcaggacatgcagcatccttcgccccactccactcactaaaggccagcgcaccccaggccccatagtattgctggttatggatttattgactttatgttccaaattcagctttttcagttggctgttttttgaaaggggataagctttgtcagtagagggcaccgaacaggcattataggaggaaaggcgcctccttcgtggttcttgttggcctccactgaggcacctctctgggaataacgttccccagcaccccaaatggatttccagtcaattcagaagcattttaccagtgaagccctcattattccagttcactgttaaagccagtaattctctatattaaactttccctgttcggtttatactccggagtataaaccgaacaggctatcagcacccctactagttctaaccacatgactcctcccccttatactaatagctagccaatcccacctatcaaaagaaaccacaacccgaaaaaaactatatattaccatactaatcctactacaactattcctaattataaccttcaccgccacc
